United States Patent Application Publication US 2015/0133529 A1 - sequence listing, part 2

SEQ ID NO: 28987 - DNA, 15 bp, Homo sapiens
agccgaattcagctt

SEQ ID NO: 28988 - DNA, 15 bp, Homo sapiens
gagccgaattcagct

SEQ ID NO: 28989 - DNA, 15 bp, Homo sapiens
cgagccgaattcagc

SEQ ID NO: 28990 - DNA, 15 bp, Homo sapiens
ccgagccgaattcag

SEQ ID NO: 28991 - DNA, 15 bp, Homo sapiens
cccgagccgaattca

SEQ ID NO: 28992 - DNA, 15 bp, Homo sapiens
tcccgagccgaattc

SEQ ID NO: 28993 - DNA, 15 bp, Homo sapiens
ctcccgagccgaatt

SEQ ID NO: 28994 - DNA, 15 bp, Homo sapiens
tctcccgagccgaat

SEQ ID NO: 28995 - DNA, 15 bp, Homo sapiens
atctcccgagccgaa

SEQ ID NO: 28996 - DNA, 15 bp, Homo sapiens
aatctcccgagccga

SEQ ID NO: 28997 - DNA, 15 bp, Homo sapiens
aaatctcccgagccg

SEQ ID NO: 28998 - DNA, 15 bp, Homo sapiens
gaaatctcccgagcc

SEQ ID NO: 28999 - DNA, 15 bp, Homo sapiens
ggaaatctcccgagc

SEQ ID NO: 29000 - DNA, 15 bp, Homo sapiens
gggaaatctcccgag

SEQ ID NO: 29001 - DNA, 15 bp, Homo sapiens
agggaaatctcccga

SEQ ID NO: 29002 - DNA, 15 bp, Homo sapiens
cagggaaatctcccg

SEQ ID NO: 29003 - DNA, 15 bp, Homo sapiens
acagggaaatctccc

SEQ ID NO: 29004 - DNA, 15 bp, Homo sapiens
gacagggaaatctcc

SEQ ID NO: 29005 - DNA, 15 bp, Homo sapiens
cgacagggaaatctc

SEQ ID NO: 29006 - DNA, 15 bp, Homo sapiens
gcgacagggaaatct

SEQ ID NO: 29007 - DNA, 15 bp, Homo sapiens
ggcgacagggaaatc

SEQ ID NO: 29008 - DNA, 15 bp, Homo sapiens
tggcgacagggaaat

SEQ ID NO: 29009 - DNA, 15 bp, Homo sapiens
ctggcgacagggaaa

SEQ ID NO: 29010 - DNA, 15 bp, Homo sapiens
cctggcgacagggaa

SEQ ID NO: 29011 - DNA, 15 bp, Homo sapiens
acctggcgacaggga

SEQ ID NO: 29012 - DNA, 15 bp, Homo sapiens
tacctggcgacaggg

SEQ ID NO: 29013 - DNA, 15 bp, Homo sapiens
ttacctggcgacagg

SEQ ID NO: 29014 - DNA, 15 bp, Homo sapiens
cttacctggcgacag

SEQ ID NO: 29015 - DNA, 15 bp, Homo sapiens
tcttacctggcgaca

SEQ ID NO: 29016 - DNA, 15 bp, Homo sapiens
ttcttacctggcgac

SEQ ID NO: 29017 - DNA, 15 bp, Homo sapiens
tttcttacctggcga

SEQ ID NO: 29018 - DNA, 15 bp, Homo sapiens
ttttcttacctggcg

SEQ ID NO: 29019 - DNA, 15 bp, Homo sapiens
gttttcttacctggc

SEQ ID NO: 29020 - DNA, 15 bp, Homo sapiens
ggttttcttacctgg

SEQ ID NO: 29021 - DNA, 15 bp, Homo sapiens
aggttttcttacctg

SEQ ID NO: 29022 - DNA, 15 bp, Homo sapiens
aaggttttcttacct

SEQ ID NO: 29023 - DNA, 15 bp, Homo sapiens
gaaggttttcttacc

SEQ ID NO: 29024 - DNA, 15 bp, Homo sapiens
cgaaggttttcttac

SEQ ID NO: 29025 - DNA, 15 bp, Homo sapiens
gcgaaggttttctta

SEQ ID NO: 29026 - DNA, 15 bp, Homo sapiens
ggcgaaggttttctt

SEQ ID NO: 29027 - DNA, 15 bp, Homo sapiens
aggcgaaggttttct

SEQ ID NO: 29028 - DNA, 15 bp, Homo sapiens
aaggcgaaggttttc

SEQ ID NO: 29029 - DNA, 15 bp, Homo sapiens
caaggcgaaggtttt

SEQ ID NO: 29030 - DNA, 15 bp, Homo sapiens
acaaggcgaaggttt

SEQ ID NO: 29031 - DNA, 15 bp, Homo sapiens
gacaaggcgaaggtt

SEQ ID NO: 29032 - DNA, 15 bp, Homo sapiens
tgacaaggcgaaggt

SEQ ID NO: 29033 - DNA, 15 bp, Homo sapiens
ctgacaaggcgaagg

SEQ ID NO: 29034 - DNA, 15 bp, Homo sapiens
cctgacaaggcgaag

SEQ ID NO: 29035 - DNA, 15 bp, Homo sapiens
gcctgacaaggcgaa

SEQ ID NO: 29036 - DNA, 15 bp, Homo sapiens
agcctgacaaggcga

SEQ ID NO: 29037 - DNA, 15 bp, Homo sapiens
tagcctgacaaggcg

SEQ ID NO: 29038 - DNA, 15 bp, Homo sapiens
ctagcctgacaaggc

SEQ ID NO: 29039 - DNA, 15 bp, Homo sapiens
cctagcctgacaagg

SEQ ID NO: 29040 - DNA, 15 bp, Homo sapiens
ccctagcctgacaag

SEQ ID NO: 29041 - DNA, 15 bp, Homo sapiens
gccctagcctgacaa

SEQ ID NO: 29042 - DNA, 15 bp, Homo sapiens
cgccctagcctgaca

SEQ ID NO: 29043 - DNA, 15 bp, Homo sapiens
ccgccctagcctgac

SEQ ID NO: 29044 - DNA, 15 bp, Homo sapiens
cccgccctagcctga

SEQ ID NO: 29045 - DNA, 15 bp, Homo sapiens
tcccgccctagcctg

SEQ ID NO: 29046 - DNA, 15 bp, Homo sapiens
ttcccgccctagcct

SEQ ID NO: 29047 - DNA, 15 bp, Homo sapiens
cttcccgccctagcc

SEQ ID NO: 29048 - DNA, 15 bp, Homo sapiens
tcttcccgccctagc

SEQ ID NO: 29049 - DNA, 15 bp, Homo sapiens
gtcttcccgccctag

SEQ ID NO: 29050 - DNA, 15 bp, Homo sapiens
ggtcttcccgcccta

SEQ ID NO: 29051 - DNA, 15 bp, Homo sapiens
cggtcttcccgccct

SEQ ID NO: 29052 - DNA, 15 bp, Homo sapiens
gcggtcttcccgccc

SEQ ID NO: 29053 - DNA, 15 bp, Homo sapiens
agcggtcttcccgcc

SEQ ID NO: 29054 - DNA, 15 bp, Homo sapiens
cagcggtcttcccgc

SEQ ID NO: 29055 - DNA, 15 bp, Homo sapiens
ccagcggtcttcccg

SEQ ID NO: 29056 - DNA, 15 bp, Homo sapiens
cccagcggtcttccc

SEQ ID NO: 29057 - DNA, 15 bp, Homo sapiens
ccccagcggtcttcc

SEQ ID NO: 29058 - DNA, 15 bp, Homo sapiens
tccccagcggtcttc

SEQ ID NO: 29059 - DNA, 15 bp, Homo sapiens
ttccccagcggtctt

SEQ ID NO: 29060 - DNA, 15 bp, Homo sapiens
gttccccagcggtct

SEQ ID NO: 29061 - DNA, 15 bp, Homo sapiens
agttccccagcggtc

SEQ ID NO: 29062 - DNA, 15 bp, Homo sapiens
aagttccccagcggt

SEQ ID NO: 29063 - DNA, 15 bp, Homo sapiens
caagttccccagcgg

SEQ ID NO: 29064 - DNA, 15 bp, Homo sapiens
acaagttccccagcg

SEQ ID NO: 29065 - DNA, 15 bp, Homo sapiens
aacaagttccccagc

SEQ ID NO: 29066 - DNA, 15 bp, Homo sapiens
caacaagttccccag

SEQ ID NO: 29067 - DNA, 15 bp, Homo sapiens
gcaacaagttcccca

SEQ ID NO: 29068 - DNA, 15 bp, Homo sapiens
agcaacaagttcccc

SEQ ID NO: 29069 - DNA, 15 bp, Homo sapiens
aagcaacaagttccc

SEQ ID NO: 29070 - DNA, 15 bp, Homo sapiens
taagcaacaagttcc

SEQ ID NO: 29071 - DNA, 15 bp, Homo sapiens
ataagcaacaagttc

SEQ ID NO: 29072 - DNA, 15 bp, Homo sapiens
gataagcaacaagtt

SEQ ID NO: 29073 - DNA, 15 bp, Homo sapiens
tgataagcaacaagt

SEQ ID NO: 29074 - DNA, 15 bp, Homo sapiens
ctgataagcaacaag

SEQ ID NO: 29075 - DNA, 15 bp, Homo sapiens
gctgataagcaacaa

SEQ ID NO: 29076 - DNA, 15 bp, Homo sapiens
cgctgataagcaaca

SEQ ID NO: 29077 - DNA, 15 bp, Homo sapiens
gcgctgataagcaac

SEQ ID NO: 29078 - DNA, 15 bp, Homo sapiens
ggcgctgataagcaa

SEQ ID NO: 29079 - DNA, 15 bp, Homo sapiens
cggcgctgataagca

SEQ ID NO: 29080 - DNA, 15 bp, Homo sapiens
ccggcgctgataagc

SEQ ID NO: 29081 - DNA, 15 bp, Homo sapiens
gccggcgctgataag

SEQ ID NO: 29082 - DNA, 15 bp, Homo sapiens
tgccggcgctgataa

SEQ ID NO: 29083 - DNA, 15 bp, Homo sapiens
ctgccggcgctgata

SEQ ID NO: 29084 - DNA, 15 bp, Homo sapiens
tctgccggcgctgat

SEQ ID NO: 29085 - DNA, 15 bp, Homo sapiens
gtctgccggcgctga

SEQ ID NO: 29086 - DNA, 15 bp, Homo sapiens
agtctgccggcgctg

SEQ ID NO: 29087 - DNA, 15 bp, Homo sapiens
tagtctgccggcgct

SEQ ID NO: 29088 - DNA, 15 bp, Homo sapiens
gtagtctgccggcgc

SEQ ID NO: 29089 - DNA, 15 bp, Homo sapiens
ggtagtctgccggcg

SEQ ID NO: 29090 - DNA, 15 bp, Homo sapiens
cggtagtctgccggc

SEQ ID NO: 29091 - DNA, 15 bp, Homo sapiens
gcggtagtctgccgg

SEQ ID NO: 29092 - DNA, 15 bp, Homo sapiens
agcggtagtctgccg

SEQ ID NO: 29093 - DNA, 15 bp, Homo sapiens
aagcggtagtctgcc

SEQ ID NO: 29094 - DNA, 15 bp, Homo sapiens
aaagcggtagtctgc

SEQ ID NO: 29095 - DNA, 15 bp, Homo sapiens
taaagcggtagtctg

SEQ ID NO: 29096 - DNA, 15 bp, Homo sapiens
ttaaagcggtagtct

SEQ ID NO: 29097 - DNA, 15 bp, Homo sapiens
attaaagcggtagtc

SEQ ID NO: 29098 - DNA, 15 bp, Homo sapiens
tattaaagcggtagt

SEQ ID NO: 29099 - DNA, 15 bp, Homo sapiens
ttattaaagcggtag

SEQ ID NO: 29100 - DNA, 15 bp, Homo sapiens
attattaaagcggta

SEQ ID NO: 29101 - DNA, 15 bp, Homo sapiens
tattattaaagcggt

SEQ ID NO: 29102 - DNA, 15 bp, Homo sapiens
ttattattaaagcgg

SEQ ID NO: 29103 - DNA, 15 bp, Homo sapiens
attattattaaagcg

SEQ ID NO: 29104 - DNA, 15 bp, Homo sapiens
tattattattaaagc

SEQ ID NO: 29105 - DNA, 15 bp, Homo sapiens
gtattattattaaag

SEQ ID NO: 29106 - DNA, 15 bp, Homo sapiens
ggtattattattaaa

SEQ ID NO: 29107 - DNA, 15 bp, Homo sapiens
tggtattattattaa

SEQ ID NO: 29108 - DNA, 15 bp, Homo sapiens
ctggtattattatta

SEQ ID NO: 29109 - DNA, 15 bp, Homo sapiens
tctggtattattatt

SEQ ID NO: 29110 - DNA, 15 bp, Homo sapiens
ttctggtattattat

SEQ ID NO: 29111 - DNA, 15 bp, Homo sapiens
tttctggtattatta

SEQ ID NO: 29112 - DNA, 15 bp, Homo sapiens
ttttctggtattatt

SEQ ID NO: 29113 - DNA, 15 bp, Homo sapiens
cttttctggtattat

SEQ ID NO: 29114 - DNA, 15 bp, Homo sapiens
gcttttctggtatta

SEQ ID NO: 29115 - DNA, 15 bp, Homo sapiens
cgcttttctggtatt

SEQ ID NO: 29116 - DNA, 15 bp, Homo sapiens
gcgcttttctggtat

SEQ ID NO: 29117 - DNA, 15 bp, Homo sapiens
tgcgcttttctggta

SEQ ID NO: 29118 - DNA, 15 bp, Homo sapiens
ctgcgcttttctggt

SEQ ID NO: 29119 - DNA, 15 bp, Homo sapiens
gctgcgcttttctgg

SEQ ID NO: 29120 - DNA, 15 bp, Homo sapiens
tgctgcgcttttctg

SEQ ID NO: 29121 - DNA, 15 bp, Homo sapiens
ctgctgcgcttttct

SEQ ID NO: 29122 - DNA, 15 bp, Homo sapiens
cctgctgcgcttttc

SEQ ID NO: 29123 - DNA, 15 bp, Homo sapiens
ccctgctgcgctttt

SEQ ID NO: 29124 - DNA, 15 bp, Homo sapiens
tccctgctgcgcttt

SEQ ID NO: 29125 - DNA, 15 bp, Homo sapiens
ctccctgctgcgctt

SEQ ID NO: 29126 - DNA, 15 bp, Homo sapiens
cctccctgctgcgct

SEQ ID NO: 29127 - DNA, 15 bp, Homo sapiens
ccctccctgctgcgc

SEQ ID NO: 29128 - DNA, 15 bp, Homo sapiens
cccctccctgctgcg

SEQ ID NO: 29129 - DNA, 15 bp, Homo sapiens
ccccctccctgctgc

SEQ ID NO: 29130 - DNA, 15 bp, Homo sapiens
accccctccctgctg

SEQ ID NO: 29131 - DNA, 15 bp, Homo sapiens
caccccctccctgct

SEQ ID NO: 29132 - DNA, 15 bp, Homo sapiens
ccaccccctccctgc

SEQ ID NO: 29133 - DNA, 15 bp, Homo sapiens
cccaccccctccctg

SEQ ID NO: 29134 - DNA, 15 bp, Homo sapiens
ccccaccccctccct

SEQ ID NO: 29135 - DNA, 15 bp, Homo sapiens
cccccaccccctccc

SEQ ID NO: 29136 - DNA, 15 bp, Homo sapiens
ccccccaccccctcc

SEQ ID NO: 29137 - DNA, 15 bp, Homo sapiens
gccccccaccccctc

SEQ ID NO: 29138 - DNA, 15 bp, Homo sapiens
cgccccccaccccct

SEQ ID NO: 29139 - DNA, 15 bp, Homo sapiens
ccgccccccaccccc

SEQ ID NO: 29140 - DNA, 15 bp, Homo sapiens
gccgccccccacccc

SEQ ID NO: 29141 - DNA, 15 bp, Homo sapiens
tgccgccccccaccc

SEQ ID NO: 29142 - DNA, 15 bp, Homo sapiens
ttgccgccccccacc

SEQ ID NO: 29143 - DNA, 15 bp, Homo sapiens
gttgccgccccccac

SEQ ID NO: 29144 - DNA, 15 bp, Homo sapiens
cgttgccgcccccca

SEQ ID NO: 29145 - DNA, 15 bp, Homo sapiens
ccgttgccgcccccc

SEQ ID NO: 29146 - DNA, 15 bp, Homo sapiens
gccgttgccgccccc

SEQ ID NO: 29147 - DNA, 15 bp, Homo sapiens
cgccgttgccgcccc

SEQ ID NO: 29148 - DNA, 15 bp, Homo sapiens
tcgccgttgccgccc

SEQ ID NO: 29149 - DNA, 15 bp, Homo sapiens
gtcgccgttgccgcc

SEQ ID NO: 29150 - DNA, 15 bp, Homo sapiens
cgtcgccgttgccgc

SEQ ID NO: 29151 - DNA, 15 bp, Homo sapiens
tcgtcgccgttgccg

SEQ ID NO: 29152 - DNA, 15 bp, Homo sapiens
gtcgtcgccgttgcc

SEQ ID NO: 29153 - DNA, 15 bp, Homo sapiens
agtcgtcgccgttgc

SEQ ID NO: 29154 - DNA, 15 bp, Homo sapiens
tagtcgtcgccgttg

SEQ ID NO: 29155 - DNA, 15 bp, Homo sapiens
ttagtcgtcgccgtt

SEQ ID NO: 29156 - DNA, 15 bp, Homo sapiens
gttagtcgtcgccgt

SEQ ID NO: 29157 - DNA, 15 bp, Homo sapiens
ggttagtcgtcgccg

SEQ ID NO: 29158 - DNA, 15 bp, Homo sapiens
aggttagtcgtcgcc

SEQ ID NO: 29159 - DNA, 15 bp, Homo sapiens
gaggttagtcgtcgc

SEQ ID NO: 29160 - DNA, 15 bp, Homo sapiens
cgaggttagtcgtcg

SEQ ID NO: 29161 - DNA, 15 bp, Homo sapiens
gcgaggttagtcgtc

SEQ ID NO: 29162 - DNA, 15 bp, Homo sapiens
agcgaggttagtcgt

SEQ ID NO: 29163 - DNA, 15 bp, Homo sapiens
cagcgaggttagtcg

SEQ ID NO: 29164 - DNA, 15 bp, Homo sapiens
acagcgaggttagtc

SEQ ID NO: 29165 - DNA, 15 bp, Homo sapiens
aacagcgaggttagt

SEQ ID NO: 29166 - DNA, 15 bp, Homo sapiens
aaacagcgaggttag

SEQ ID NO: 29167 - DNA, 15 bp, Homo sapiens
taaacagcgaggtta

SEQ ID NO: 29168 - DNA, 15 bp, Homo sapiens
gtaaacagcgaggtt

SEQ ID NO: 29169 - DNA, 15 bp, Homo sapiens
cgtaaacagcgaggt

SEQ ID NO: 29170 - DNA, 15 bp, Homo sapiens
acgtaaacagcgagg

SEQ ID NO: 29171 - DNA, 15 bp, Homo sapiens
cacgtaaacagcgag

SEQ ID NO: 29172 - DNA, 15 bp, Homo sapiens
tcacgtaaacagcga

SEQ ID NO: 29173 - DNA, 15 bp, Homo sapiens
gtcacgtaaacagcg

SEQ ID NO: 29174 - DNA, 15 bp, Homo sapiens
ggtcacgtaaacagc

SEQ ID NO: 29175 - DNA, 15 bp, Homo sapiens
cggtcacgtaaacag

SEQ ID NO: 29176 - DNA, 15 bp, Homo sapiens
tcggtcacgtaaaca

SEQ ID NO: 29177 - DNA, 15 bp, Homo sapiens
gtcggtcacgtaaac

SEQ ID NO: 29178 - DNA, 15 bp, Homo sapiens
agtcggtcacgtaaa

SEQ ID NO: 29179 - DNA, 15 bp, Homo sapiens
gagtcggtcacgtaa

SEQ ID NO: 29180 - DNA, 15 bp, Homo sapiens
tgagtcggtcacgta

SEQ ID NO: 29181 - DNA, 15 bp, Homo sapiens
gtgagtcggtcacgt

SEQ ID NO: 29182 - DNA, 15 bp, Homo sapiens
agtgagtcggtcacg

SEQ ID NO: 29183 - DNA, 15 bp, Homo sapiens
cagtgagtcggtcac

SEQ ID NO: 29184 - DNA, 15 bp, Homo sapiens
acagtgagtcggtca

SEQ ID NO: 29185 - DNA, 15 bp, Homo sapiens
cacagtgagtcggtc

SEQ ID NO: 29186 - DNA, 15 bp, Homo sapiens
tcacagtgagtcggt

SEQ ID NO: 29187 - DNA, 15 bp, Homo sapiens
gtcacagtgagtcgg

SEQ ID NO: 29188 - DNA, 15 bp, Homo sapiens
agtcacagtgagtcg

SEQ ID NO: 29189 - DNA, 15 bp, Homo sapiens
gagtcacagtgagtc

SEQ ID NO: 29190 - DNA, 15 bp, Homo sapiens
agagtcacagtgagt

SEQ ID NO: 29191 - DNA, 15 bp, Homo sapiens
gagagtcacagtgag

SEQ ID NO: 29192 - DNA, 15 bp, Homo sapiens
agagagtcacagtga

SEQ ID NO: 29193 - DNA, 15 bp, Homo sapiens
cagagagtcacagtg

SEQ ID NO: 29194 - DNA, 15 bp, Homo sapiens
ccagagagtcacagt

SEQ ID NO: 29195 - DNA, 15 bp, Homo sapiens
cccagagagtcacag

SEQ ID NO: 29196 - DNA, 15 bp, Homo sapiens
acccagagagtcaca

SEQ ID NO: 29197 - DNA, 15 bp, Homo sapiens
tacccagagagtcac

SEQ ID NO: 29198 - DNA, 15 bp, Homo sapiens
ttacccagagagtca

SEQ ID NO: 29199 - DNA, 15 bp, Homo sapiens
tttacccagagagtc

SEQ ID NO: 29200 - DNA, 15 bp, Homo sapiens
ttttacccagagagt

SEQ ID NO: 29201 - DNA, 15 bp, Homo sapiens
tttttacccagagag

SEQ ID NO: 29202 - DNA, 15 bp, Homo sapiens
ttttttacccagaga

SEQ ID NO: 29203 - DNA, 15 bp, Homo sapiens
tttttttacccagag

SEQ ID NO: 29204 - DNA, 15 bp, Homo sapiens
ctttttttacccaga

SEQ ID NO: 29205 - DNA, 15 bp, Homo sapiens
cctttttttacccag

SEQ ID NO: 29206 - DNA, 15 bp, Homo sapiens
tcctttttttaccca

SEQ ID NO: 29207 - DNA, 15 bp, Homo sapiens
ttcctttttttaccc

SEQ ID NO: 29208 - DNA, 15 bp, Homo sapiens
tttcctttttttacc

SEQ ID NO: 29209 - DNA, 15 bp, Homo sapiens
gtttcctttttttac

SEQ ID NO: 29210 - DNA, 15 bp, Homo sapiens
agtttccttttttta

SEQ ID NO: 29211 - DNA, 15 bp, Homo sapiens
aagtttccttttttt

SEQ ID NO: 29212 - DNA, 15 bp, Homo sapiens
gaagtttcctttttt

SEQ ID NO: 29213 - DNA, 15 bp, Homo sapiens
agaagtttccttttt

SEQ ID NO: 29214 - DNA, 15 bp, Homo sapiens
aagaagtttcctttt

SEQ ID NO: 29215 - DNA, 15 bp, Homo sapiens
taagaagtttccttt

SEQ ID NO: 29216 - DNA, 15 bp, Homo sapiens
ctaagaagtttcctt

SEQ ID NO: 29217 - DNA, 15 bp, Homo sapiens
tctaagaagtttcct

SEQ ID NO: 29218 - DNA, 15 bp, Homo sapiens
ttctaagaagtttcc

SEQ ID NO: 29219 - DNA, 15 bp, Homo sapiens
tttctaagaagtttc

SEQ ID NO: 29220 - DNA, 15 bp, Homo sapiens
ttttctaagaagttt

SEQ ID NO: 29221 - DNA, 15 bp, Homo sapiens
cttttctaagaagtt

SEQ ID NO: 29222 - DNA, 15 bp, Homo sapiens
acttttctaagaagt

SEQ ID NO: 29223 - DNA, 15 bp, Homo sapiens
aacttttctaagaag

SEQ ID NO: 29224 - DNA, 15 bp, Homo sapiens
gaacttttctaagaa

SEQ ID NO: 29225 - DNA, 15 bp, Homo sapiens
cgaacttttctaaga

SEQ ID NO: 29226 - DNA, 15 bp, Homo sapiens
acgaacttttctaag

SEQ ID NO: 29227 - DNA, 15 bp, Homo sapiens
cacgaacttttctaa

SEQ ID NO: 29228 - DNA, 15 bp, Homo sapiens
gcacgaacttttcta

SEQ ID NO: 29229 - DNA, 15 bp, Homo sapiens
ggcacgaacttttct

SEQ ID NO: 29230 - DNA, 15 bp, Homo sapiens
gggcacgaacttttc

SEQ ID NO: 29231 - DNA, 15 bp, Homo sapiens
ggggcacgaactttt

SEQ ID NO: 29232 - DNA, 15 bp, Homo sapiens
aggggcacgaacttt

SEQ ID NO: 29233 - DNA, 15 bp, Homo sapiens
gaggggcacgaactt

SEQ ID NO: 29234 - DNA, 15 bp, Homo sapiens
ggaggggcacgaact

SEQ ID NO: 29235 - DNA, 15 bp, Homo sapiens
gggaggggcacgaac

SEQ ID NO: 29236 - DNA, 15 bp, Homo sapiens
ggggaggggcacgaa

SEQ ID NO: 29237 - DNA, 15 bp, Homo sapiens
gggggaggggcacga

SEQ ID NO: 29238 - DNA, 15 bp, Homo sapiens
agggggaggggcacg

SEQ ID NO: 29239 - DNA, 15 bp, Homo sapiens
gagggggaggggcac

SEQ ID NO: 29240 - DNA, 15 bp, Homo sapiens
ggagggggaggggca

SEQ ID NO: 29241 - DNA, 15 bp, Homo sapiens
gggagggggaggggc

SEQ ID NO: 29242 - DNA, 15 bp, Homo sapiens
ggggagggggagggg

SEQ ID NO: 29243 - DNA, 15 bp, Homo sapiens
gggggagggggaggg

SEQ ID NO: 29244 - DNA, 15 bp, Homo sapiens
tgggggagggggagg

SEQ ID NO: 29245 - DNA, 15 bp, Homo sapiens
atgggggagggggag

SEQ ID NO: 29246 - DNA, 15 bp, Homo sapiens
gatgggggaggggga

SEQ ID NO: 29247 - DNA, 15 bp, Homo sapiens
tgatgggggaggggg

SEQ ID NO: 29248 - DNA, 15 bp, Homo sapiens
atgatgggggagggg

SEQ ID NO: 29249 - DNA, 15 bp, Homo sapiens
catgatgggggaggg

SEQ ID NO: 29250 - DNA, 15 bp, Homo sapiens
tcatgatgggggagg

SEQ ID NO: 29251 - DNA, 15 bp, Homo sapiens
gtcatgatgggggag

SEQ ID NO: 29252 - DNA, 15 bp, Homo sapiens
agtcatgatggggga

SEQ ID NO: 29253 - DNA, 15 bp, Homo sapiens
tagtcatgatggggg

SEQ ID NO: 29254 - DNA, 15 bp, Homo sapiens
ttagtcatgatgggg

SEQ ID NO: 29255 - DNA, 15 bp, Homo sapiens
cttagtcatgatggg

SEQ ID NO: 29256 - DNA, 15 bp, Homo sapiens
ccttagtcatgatgg

SEQ ID NO: 29257 - DNA, 15 bp, Homo sapiens
cccttagtcatgatg

SEQ ID NO: 29258 - DNA, 15 bp, Homo sapiens
acccttagtcatgat

SEQ ID NO: 29259 - DNA, 15 bp, Homo sapiens
gacccttagtcatga

SEQ ID NO: 29260 - DNA, 15 bp, Homo sapiens
agacccttagtcatg

SEQ ID NO: 29261 - DNA, 15 bp, Homo sapiens
gagacccttagtcat

SEQ ID NO: 29262 - DNA, 15 bp, Homo sapiens
ggagacccttagtca

SEQ ID NO: 29263 - DNA, 15 bp, Homo sapiens
tggagacccttagtc

SEQ ID NO: 29264 - DNA, 15 bp, Homo sapiens
ctggagacccttagt

SEQ ID NO: 29265 - DNA, 15 bp, Homo sapiens
gctggagacccttag

SEQ ID NO: 29266 - DNA, 15 bp, Homo sapiens
ggctggagaccctta

SEQ ID NO: 29267 - DNA, 15 bp, Homo sapiens
cggctggagaccctt

SEQ ID NO: 29268 - DNA, 15 bp, Homo sapiens
tcggctggagaccct

SEQ ID NO: 29269 - DNA, 15 bp, Homo sapiens
atcggctggagaccc

SEQ ID NO: 29270 - DNA, 15 bp, Homo sapiens
catcggctggagacc

SEQ ID NO: 29271 - DNA, 15 bp, Homo sapiens
tcatcggctggagac

SEQ ID NO: 29272 - DNA, 15 bp, Homo sapiens
ctcatcggctggaga

SEQ ID NO: 29273 - DNA, 15 bp, Homo sapiens
cctcatcggctggag

SEQ ID NO: 29274 - DNA, 15 bp, Homo sapiens
acctcatcggctgga

SEQ ID NO: 29275 - DNA, 15 bp, Homo sapiens
gacctcatcggctgg

SEQ ID NO: 29276 - DNA, 15 bp, Homo sapiens
cgacctcatcggctg

SEQ ID NO: 29277 - DNA, 15 bp, Homo sapiens
acgacctcatcggct

SEQ ID NO: 29278 - DNA, 15 bp, Homo sapiens
cacgacctcatcggc

SEQ ID NO: 29279 - DNA, 15 bp, Homo sapiens
tcacgacctcatcgg

SEQ ID NO: 29280 - DNA, 15 bp, Homo sapiens
ctcacgacctcatcg

SEQ ID NO: 29281 - DNA, 15 bp, Homo sapiens
actcacgacctcatc

SEQ ID NO: 29282 - DNA, 15 bp, Homo sapiens
cactcacgacctcat

SEQ ID NO: 29283 - DNA, 15 bp, Homo sapiens
tcactcacgacctca

SEQ ID NO: 29284 - DNA, 15 bp, Homo sapiens
atcactcacgacctc

SEQ ID NO: 29285 - DNA, 15 bp, Homo sapiens
catcactcacgacct

SEQ ID NO: 29286 - DNA, 15 bp, Homo sapiens
tcatcactcacgacc

SEQ ID NO: 29287 - DNA, 15 bp, Homo sapiens
atcatcactcacgac

SEQ ID NO: 29288 - DNA, 15 bp, Homo sapiens
gatcatcactcacga

SEQ ID NO: 29289 - DNA, 15 bp, Homo sapiens
tgatcatcactcacg

SEQ ID NO: 29290 - DNA, 15 bp, Homo sapiens
ttgatcatcactcac

SEQ ID NO: 29291 - DNA, 15 bp, Homo sapiens
tttgatcatcactca

SEQ ID NO: 29292 - DNA, 15 bp, Homo sapiens
atttgatcatcactc

SEQ ID NO: 29293 - DNA, 15 bp, Homo sapiens
catttgatcatcact

SEQ ID NO: 29294 - DNA, 15 bp, Homo sapiens
ccatttgatcatcac

SEQ ID NO: 29295 - DNA, 15 bp, Homo sapiens
cccatttgatcatca

SEQ ID NO: 29296 - DNA, 15 bp, Homo sapiens
ccccatttgatcatc

SEQ ID NO: 29297 - DNA, 15 bp, Homo sapiens
tccccatttgatcat

SEQ ID NO: 29298 - DNA, 15 bp, Homo sapiens
gtccccatttgatca

SEQ ID NO: 29299 - DNA, 15 bp, Homo sapiens
agtccccatttgatc

SEQ ID NO: 29300 - DNA, 15 bp, Homo sapiens
cagtccccatttgat

SEQ ID NO: 29301 - DNA, 15 bp, Homo sapiens
ccagtccccatttga

SEQ ID NO: 29302 - DNA, 15 bp, Homo sapiens
cccagtccccatttg

SEQ ID NO: 29303 - DNA, 15 bp, Homo sapiens
ccccagtccccattt

SEQ ID NO: 29304 - DNA, 15 bp, Homo sapiens
cccccagtccccatt

SEQ ID NO: 29305 - DNA, 15 bp, Homo sapiens
ccccccagtccccat

SEQ ID NO: 29306 - DNA, 15 bp, Homo sapiens
tccccccagtcccca

SEQ ID NO: 29307 - DNA, 15 bp, Homo sapiens
ctccccccagtcccc

SEQ ID NO: 29308 - DNA, 15 bp, Homo sapiens
cctccccccagtccc

SEQ ID NO: 29309 - DNA, 15 bp, Homo sapiens
ccctccccccagtcc

SEQ ID NO: 29310 - DNA, 15 bp, Homo sapiens
cccctccccccagtc

SEQ ID NO: 29311 - DNA, 15 bp, Homo sapiens
ccccctccccccagt

SEQ ID NO: 29312 - DNA, 15 bp, Homo sapiens
cccccctccccccag

SEQ ID NO: 29313 - DNA, 15 bp, Homo sapiens
gcccccctcccccca

SEQ ID NO: 29314 - DNA, 15 bp, Homo sapiens
cgcccccctcccccc

SEQ ID NO: 29315 - DNA, 15 bp, Homo sapiens
tcgcccccctccccc

SEQ ID NO: 29316 - DNA, 15 bp, Homo sapiens
ctcgcccccctcccc

SEQ ID NO: 29317 - DNA, 15 bp, Homo sapiens
actcgcccccctccc

SEQ ID NO: 29318 - DNA, 15 bp, Homo sapiens
tactcgcccccctcc

SEQ ID NO: 29319 - DNA, 15 bp, Homo sapiens
ttactcgcccccctc

SEQ ID NO: 29320 - DNA, 15 bp, Homo sapiens
cttactcgcccccct

SEQ ID NO: 29321 - DNA, 15 bp, Homo sapiens
acttactcgcccccc

SEQ ID NO: 29322 - DNA, 15 bp, Homo sapiens
cacttactcgccccc

SEQ ID NO: 29323 - DNA, 15 bp, Homo sapiens
tcacttactcgcccc

SEQ ID NO: 29324 - DNA, 15 bp, Homo sapiens
gtcacttactcgccc

SEQ ID NO: 29325 - DNA, 15 bp, Homo sapiens
agtcacttactcgcc

SEQ ID NO: 29326 - DNA, 15 bp, Homo sapiens
aagtcacttactcgc

SEQ ID NO: 29327 - DNA, 15 bp, Homo sapiens
caagtcacttactcg

SEQ ID NO: 29328 - DNA, 15 bp, Homo sapiens
acaagtcacttactc

SEQ ID NO: 29329 - DNA, 15 bp, Homo sapiens
gacaagtcacttact

SEQ ID NO: 29330 - DNA, 15 bp, Homo sapiens
ggacaagtcacttac

SEQ ID NO: 29331 - DNA, 15 bp, Homo sapiens
aggacaagtcactta

SEQ ID NO: 29332 - DNA, 15 bp, Homo sapiens
aaggacaagtcactt

SEQ ID NO: 29333 - DNA, 15 bp, Homo sapiens
caaggacaagtcact

SEQ ID NO: 29334 - DNA, 15 bp, Homo sapiens
ccaaggacaagtcac

SEQ ID NO: 29335 - DNA, 15 bp, Homo sapiens
cccaaggacaagtca

SEQ ID NO: 29336 - DNA, 15 bp, Homo sapiens
tcccaaggacaagtc

SEQ ID NO: 29337 - DNA, 15 bp, Homo sapiens
ttcccaaggacaagt

SEQ ID NO: 29338 - DNA, 15 bp, Homo sapiens
gttcccaaggacaag

SEQ ID NO: 29339 - DNA, 15 bp, Homo sapiens
tgttcccaaggacaa

SEQ ID NO: 29340 - DNA, 15 bp, Homo sapiens
atgttcccaaggaca

SEQ ID NO: 29341 - DNA, 15 bp, Homo sapiens
gatgttcccaaggac

SEQ ID NO: 29342 - DNA, 15 bp, Homo sapiens
agatgttcccaagga

SEQ ID NO: 29343 - DNA, 15 bp, Homo sapiens
cagatgttcccaagg

SEQ ID NO: 29344 - DNA, 15 bp, Homo sapiens
gcagatgttcccaag

SEQ ID NO: 29345 - DNA, 15 bp, Homo sapiens
tgcagatgttcccaa

SEQ ID NO: 29346 - DNA, 15 bp, Homo sapiens
atgcagatgttccca

SEQ ID NO: 29347 - DNA, 15 bp, Homo sapiens
catgcagatgttccc

SEQ ID NO: 29348 - DNA, 15 bp, Homo sapiens
gcatgcagatgttcc

SEQ ID NO: 29349 - DNA, 15 bp, Homo sapiens
cgcatgcagatgttc

SEQ ID NO: 29350 - DNA, 15 bp, Homo sapiens
acgcatgcagatgtt

SEQ ID NO: 29351 - DNA, 15 bp, Homo sapiens
gacgcatgcagatgt

SEQ ID NO: 29352 - DNA, 15 bp, Homo sapiens
cgacgcatgcagatg

SEQ ID NO: 29353 - DNA, 15 bp, Homo sapiens
tcgacgcatgcagat

SEQ ID NO: 29354 - DNA, 15 bp, Homo sapiens
ttcgacgcatgcaga

SEQ ID NO: 29355 - DNA, 15 bp, Homo sapiens
cttcgacgcatgcag

SEQ ID NO: 29356 - DNA, 15 bp, Homo sapiens
gcttcgacgcatgca

SEQ ID NO: 29357 - DNA, 15 bp, Homo sapiens
cgcttcgacgcatgc

SEQ ID NO: 29358 - DNA, 15 bp, Homo sapiens
gcgcttcgacgcatg

SEQ ID NO: 29359 - DNA, 15 bp, Homo sapiens
cgcgcttcgacgcat

SEQ ID NO: 29360 - DNA, 15 bp, Homo sapiens
tcgcgcttcgacgca

SEQ ID NO: 29361 - DNA, 15 bp, Homo sapiens
ttcgcgcttcgacgc

SEQ ID NO: 29362 - DNA, 15 bp, Homo sapiens
gttcgcgcttcgacg

SEQ ID NO: 29363 - DNA, 15 bp, Homo sapiens
ggttcgcgcttcgac

SEQ ID NO: 29364 - DNA, 15 bp, Homo sapiens
tggttcgcgcttcga

SEQ ID NO: 29365 - DNA, 15 bp, Homo sapiens
ctggttcgcgcttcg

SEQ ID NO: 29366 - DNA, 15 bp, Homo sapiens
gctggttcgcgcttc

SEQ ID NO: 29367 - DNA, 15 bp, Homo sapiens
ggctggttcgcgctt

SEQ ID NO: 29368 - DNA, 15 bp, Homo sapiens
gggctggttcgcgct

SEQ ID NO: 29369 - DNA, 15 bp, Homo sapiens
tgggctggttcgcgc

SEQ ID NO: 29370 - DNA, 15 bp, Homo sapiens
ttgggctggttcgcg

SEQ ID NO: 29371 - DNA, 15 bp, Homo sapiens
gttgggctggttcgc

SEQ ID NO: 29372 - DNA, 15 bp, Homo sapiens
tgttgggctggttcg

SEQ ID NO: 29373 - DNA, 15 bp, Homo sapiens
ttgttgggctggttc

SEQ ID NO: 29374 - DNA, 15 bp, Homo sapiens
gttgttgggctggtt

SEQ ID NO: 29375 - DNA, 15 bp, Homo sapiens
agttgttgggctggt

SEQ ID NO: 29376 - DNA, 15 bp, Homo sapiens
aagttgttgggctgg

SEQ ID NO: 29377 - DNA, 15 bp, Homo sapiens
aaagttgttgggctg

SEQ ID NO: 29378 - DNA, 15 bp, Homo sapiens
gaaagttgttgggct

SEQ ID NO: 29379 - DNA, 15 bp, Homo sapiens
ggaaagttgttgggc

SEQ ID NO: 29380 - DNA, 15 bp, Homo sapiens
gggaaagttgttggg

SEQ ID NO: 29381 - DNA, 15 bp, Homo sapiens
agggaaagttgttgg

SEQ ID NO: 29382 - DNA, 15 bp, Homo sapiens
aagggaaagttgttg

SEQ ID NO: 29383 - DNA, 15 bp, Homo sapiens
aaagggaaagttgtt

SEQ ID NO: 29384 - DNA, 15 bp, Homo sapiens
aaaagggaaagttgt

SEQ ID NO: 29385 - DNA, 15 bp, Homo sapiens
gaaaagggaaagttg

SEQ ID NO: 29386 - DNA, 15 bp, Homo sapiens
ggaaaagggaaagtt

SEQ ID NO: 29387 - DNA, 15 bp, Homo sapiens
aggaaaagggaaagt

SEQ ID NO: 29388 - DNA, 15 bp, Homo sapiens
gaggaaaagggaaag

SEQ ID NO: 29389 - DNA, 15 bp, Homo sapiens
agaggaaaagggaaa

SEQ ID NO: 29390 - DNA, 15 bp, Homo sapiens
aagaggaaaagggaa

SEQ ID NO: 29391 - DNA, 15 bp, Homo sapiens
taagaggaaaaggga

SEQ ID NO: 29392 - DNA, 15 bp, Homo sapiens
ctaagaggaaaaggg

SEQ ID NO: 29393 - DNA, 15 bp, Homo sapiens
cctaagaggaaaagg

SEQ ID NO: 29394 - DNA, 15 bp, Homo sapiens
acctaagaggaaaag

SEQ ID NO: 29395 - DNA, 15 bp, Homo sapiens
tacctaagaggaaaa

SEQ ID NO: 29396 - DNA, 15 bp, Homo sapiens
gtacctaagaggaaa

SEQ ID NO: 29397 - DNA, 15 bp, Homo sapiens
agtacctaagaggaa

SEQ ID NO: 29398 - DNA, 15 bp, Homo sapiens
cagtacctaagagga

SEQ ID NO: 29399 - DNA, 15 bp, Homo sapiens
tcagtacctaagagg

SEQ ID NO: 29400 - DNA, 15 bp, Homo sapiens
atcagtacctaagag

SEQ ID NO: 29401 - DNA, 15 bp, Homo sapiens
catcagtacctaaga

SEQ ID NO: 29402 - DNA, 15 bp, Homo sapiens
tcatcagtacctaag

SEQ ID NO: 29403 - DNA, 15 bp, Homo sapiens
gtcatcagtacctaa

SEQ ID NO: 29404 - DNA, 15 bp, Homo sapiens
agtcatcagtaccta

SEQ ID NO: 29405 - DNA, 15 bp, Homo sapiens
tagtcatcagtacct

SEQ ID NO: 29406 - DNA, 15 bp, Homo sapiens
ctagtcatcagtacc

SEQ ID NO: 29407 - DNA, 15 bp, Homo sapiens
cctagtcatcagtac

SEQ ID NO: 29408 - DNA, 15 bp, Homo sapiens
gcctagtcatcagta

SEQ ID NO: 29409 - DNA, 15 bp, Homo sapiens
cgcctagtcatcagt

SEQ ID NO: 29410 - DNA, 15 bp, Homo sapiens
tcgcctagtcatcag

SEQ ID NO: 29411 - DNA, 15 bp, Homo sapiens
ctcgcctagtcatca

SEQ ID NO: 29412 - DNA, 15 bp, Homo sapiens
tctcgcctagtcatc

SEQ ID NO: 29413 - DNA, 15 bp, Homo sapiens
ctctcgcctagtcat

SEQ ID NO: 29414 - DNA, 15 bp, Homo sapiens
cctctcgcctagtca

SEQ ID NO: 29415 - DNA, 15 bp, Homo sapiens
gcctctcgcctagtc

SEQ ID NO: 29416 - DNA, 15 bp, Homo sapiens
tgcctctcgcctagt

SEQ ID NO: 29417 - DNA, 15 bp, Homo sapiens
gtgcctctcgcctag

SEQ ID NO: 29418 - DNA, 15 bp, Homo sapiens
ggtgcctctcgccta

SEQ ID NO: 29419 - DNA, 15 bp, Homo sapiens
tggtgcctctcgcct

SEQ ID NO: 29420 - DNA, 15 bp, Homo sapiens
ttggtgcctctcgcc

SEQ ID NO: 29421 - DNA, 15 bp, Homo sapiens
cttggtgcctctcgc

SEQ ID NO: 29422 - DNA, 15 bp, Homo sapiens
ccttggtgcctctcg

SEQ ID NO: 29423 - DNA, 15 bp, Homo sapiens
gccttggtgcctctc

SEQ ID NO: 29424 - DNA, 15 bp, Homo sapiens
cgccttggtgcctct

SEQ ID NO: 29425 - DNA, 15 bp, Homo sapiens
tcgccttggtgcctc

SEQ ID NO: 29426 - DNA, 15 bp, Homo sapiens
ctcgccttggtgcct

SEQ ID NO: 29427 - DNA, 15 bp, Homo sapiens
gctcgccttggtgcc

SEQ ID NO: 29428 - DNA, 15 bp, Homo sapiens
ggctcgccttggtgc

SEQ ID NO: 29429 - DNA, 15 bp, Homo sapiens
tggctcgccttggtg

SEQ ID NO: 29430 - DNA, 15 bp, Homo sapiens
gtggctcgccttggt

SEQ ID NO: 29431 - DNA, 15 bp, Homo sapiens
agtggctcgccttgg

SEQ ID NO: 29432 - DNA, 15 bp, Homo sapiens
tagtggctcgccttg

SEQ ID NO: 29433 - DNA, 15 bp, Homo sapiens
ctagtggctcgcctt

SEQ ID NO: 29434 - DNA, 15 bp, Homo sapiens
actagtggctcgcct

SEQ ID NO: 29435 - DNA, 15 bp, Homo sapiens
aactagtggctcgcc

SEQ ID NO: 29436 - DNA, 15 bp, Homo sapiens
caactagtggctcgc

SEQ ID NO: 29437 - DNA, 15 bp, Homo sapiens
gcaactagtggctcg

SEQ ID NO: 29438 - DNA, 15 bp, Homo sapiens
ggcaactagtggctc

SEQ ID NO: 29439 - DNA, 15 bp, Homo sapiens
gggcaactagtggct

SEQ ID NO: 29440 - DNA, 15 bp, Homo sapiens
tgggcaactagtggc

SEQ ID NO: 29441 - DNA, 15 bp, Homo sapiens
gtgggcaactagtgg

SEQ ID NO: 29442 - DNA, 15 bp, Homo sapiens
tgtgggcaactagtg

SEQ ID NO: 29443 - DNA, 15 bp, Homo sapiens
ctgtgggcaactagt

SEQ ID NO: 29444 - DNA, 15 bp, Homo sapiens
cctgtgggcaactag

SEQ ID NO: 29445 - DNA, 15 bp, Homo sapiens
tcctgtgggcaacta

SEQ ID NO: 29446 - DNA, 15 bp, Homo sapiens
ttcctgtgggcaact

SEQ ID NO: 29447 - DNA, 15 bp, Homo sapiens
gttcctgtgggcaac

SEQ ID NO: 29448 - DNA, 15 bp, Homo sapiens
ggttcctgtgggcaa

SEQ ID NO: 29449 - DNA, 15 bp, Homo sapiens
aggttcctgtgggca

SEQ ID NO: 29450 - DNA, 15 bp, Homo sapiens
caggttcctgtgggc

SEQ ID NO: 29451 - DNA, 15 bp, Homo sapiens
acaggttcctgtggg

SEQ ID NO: 29452 - DNA, 15 bp, Homo sapiens
cacaggttcctgtgg

SEQ ID NO: 29453 - DNA, 15 bp, Homo sapiens
acacaggttcctgtg

SEQ ID NO: 29454 - DNA, 15 bp, Homo sapiens
tacacaggttcctgt

SEQ ID NO: 29455 - DNA, 15 bp, Homo sapiens
ttacacaggttcctg

SEQ ID NO: 29456 - DNA, 15 bp, Homo sapiens
cttacacaggttcct

SEQ ID NO: 29457 - DNA, 15 bp, Homo sapiens
gcttacacaggttcc

SEQ ID NO: 29458 - DNA, 15 bp, Homo sapiens
ggcttacacaggttc

SEQ ID NO: 29459 - DNA, 15 bp, Homo sapiens
cggcttacacaggtt

SEQ ID NO: 29460 - DNA, 15 bp, Homo sapiens
tcggcttacacaggt

SEQ ID NO: 29461 - DNA, 15 bp, Homo sapiens
ctcggcttacacagg

SEQ ID NO: 29462 - DNA, 15 bp, Homo sapiens
gctcggcttacacag

SEQ ID NO: 29463 - DNA, 15 bp, Homo sapiens
agctcggcttacaca

SEQ ID NO: 29464 - DNA, 15 bp, Homo sapiens
gagctcggcttacac

SEQ ID NO: 29465 - DNA, 15 bp, Homo sapiens
agagctcggcttaca

SEQ ID NO: 29466 - DNA, 15 bp, Homo sapiens
gagagctcggcttac

SEQ ID NO: 29467 - DNA, 15 bp, Homo sapiens
cgagagctcggctta

SEQ ID NO: 29468 - DNA, 15 bp, Homo sapiens
tcgagagctcggctt

SEQ ID NO: 29469 - DNA, 15 bp, Homo sapiens
ctcgagagctcggct

SEQ ID NO: 29470 - DNA, 15 bp, Homo sapiens
gctcgagagctcggc

SEQ ID NO: 29471 - DNA, 15 bp, Homo sapiens
cgctcgagagctcgg

SEQ ID NO: 29472 - DNA, 15 bp, Homo sapiens
ccgctcgagagctcg

SEQ ID NO: 29473 - DNA, 15 bp, Homo sapiens
gccgctcgagagctc

SEQ ID NO: 29474 - DNA, 15 bp, Homo sapiens
agccgctcgagagct

SEQ ID NO: 29475 - DNA, 15 bp, Homo sapiens
cagccgctcgagagc

SEQ ID NO: 29476 - DNA, 15 bp, Homo sapiens
tcagccgctcgagag

SEQ ID NO: 29477 - DNA, 15 bp, Homo sapiens
ctcagccgctcgaga

SEQ ID NO: 29478 - DNA, 15 bp, Homo sapiens
actcagccgctcgag

SEQ ID NO: 29479 - DNA, 15 bp, Homo sapiens
aactcagccgctcga

SEQ ID NO: 29480 - DNA, 15 bp, Homo sapiens
caactcagccgctcg

SEQ ID NO: 29481 - DNA, 15 bp, Homo sapiens
tcaactcagccgctc

SEQ ID NO: 29482 - DNA, 15 bp, Homo sapiens
ttcaactcagccgct

SEQ ID NO: 29483 - DNA, 15 bp, Homo sapiens
attcaactcagccgc

SEQ ID NO: 29484 - DNA, 15 bp, Homo sapiens
cattcaactcagccg

SEQ ID NO: 29485 - DNA, 15 bp, Homo sapiens
tcattcaactcagcc

SEQ ID NO: 29486 - DNA, 15 bp, Homo sapiens
ttcattcaactcagc

SEQ ID NO: 29487 - DNA, 15 bp, Homo sapiens
cttcattcaactcag

SEQ ID NO: 29488 - DNA, 15 bp, Homo sapiens
acttcattcaactca

SEQ ID NO: 29489 - DNA, 15 bp, Homo sapiens
aacttcattcaactc

SEQ ID NO: 29490 - DNA, 15 bp, Homo sapiens
taacttcattcaact

SEQ ID NO: 29491 - DNA, 15 bp, Homo sapiens
ataacttcattcaac

SEQ ID NO: 29492 - DNA, 15 bp, Homo sapiens
cataacttcattcaa

SEQ ID NO: 29493 - DNA, 15 bp, Homo sapiens
tcataacttcattca

SEQ ID NO: 29494 - DNA, 15 bp, Homo sapiens
gtcataacttcattc

SEQ ID NO: 29495 - DNA, 15 bp, Homo sapiens
agtcataacttcatt

SEQ ID NO: 29496 - DNA, 15 bp, Homo sapiens
cagtcataacttcat

SEQ ID NO: 29497 - DNA, 15 bp, Homo sapiens
gcagtcataacttca

SEQ ID NO: 29498 - DNA, 15 bp, Homo sapiens
cgcagtcataacttc

SEQ ID NO: 29499 - DNA, 15 bp, Homo sapiens
acgcagtcataactt

SEQ ID NO: 29500 - DNA, 15 bp, Homo sapiens
aacgcagtcataact

SEQ ID NO: 29501 - DNA, 15 bp, Homo sapiens
aaacgcagtcataac

SEQ ID NO: 29502 - DNA, 15 bp, Homo sapiens
caaacgcagtcataa

SEQ ID NO: 29503 - DNA, 15 bp, Homo sapiens
gcaaacgcagtcata

SEQ ID NO: 29504 - DNA, 15 bp, Homo sapiens
agcaaacgcagtcat

SEQ ID NO: 29505 - DNA, 15 bp, Homo sapiens
gagcaaacgcagtca

SEQ ID NO: 29506 - DNA, 15 bp, Homo sapiens
agagcaaacgcagtc

SEQ ID NO: 29507 - DNA, 15 bp, Homo sapiens
tagagcaaacgcagt

SEQ ID NO: 29508 - DNA, 15 bp, Homo sapiens
ttagagcaaacgcag

SEQ ID NO: 29509 - DNA, 15 bp, Homo sapiens
attagagcaaacgca

SEQ ID NO: 29510 - DNA, 15 bp, Homo sapiens
cattagagcaaacgc

SEQ ID NO: 29511 - DNA, 15 bp, Homo sapiens
ccattagagcaaacg

SEQ ID NO: 29512 - DNA, 15 bp, Homo sapiens
cccattagagcaaac

SEQ ID NO: 29513 - DNA, 15 bp, Homo sapiens
acccattagagcaaa

SEQ ID NO: 29514 - DNA, 15 bp, Homo sapiens
aacccattagagcaa

SEQ ID NO: 29515 - DNA, 15 bp, Homo sapiens
taacccattagagca

SEQ ID NO: 29516 - DNA, 15 bp, Homo sapiens
ataacccattagagc

SEQ ID NO: 29517 - DNA, 15 bp, Homo sapiens
cataacccattagag

SEQ ID NO: 29518 - DNA, 15 bp, Homo sapiens
ccataacccattaga

SEQ ID NO: 29519 - DNA, 15 bp, Homo sapiens
gccataacccattag

SEQ ID NO: 29520 - DNA, 15 bp, Homo sapiens
agccataacccatta

SEQ ID NO: 29521 - DNA, 15 bp, Homo sapiens
aagccataacccatt

SEQ ID NO: 29522 - DNA, 15 bp, Homo sapiens
gaagccataacccat

SEQ ID NO: 29523 - DNA, 15 bp, Homo sapiens
ggaagccataaccca

SEQ ID NO: 29524 - DNA, 15 bp, Homo sapiens
gggaagccataaccc

SEQ ID NO: 29525 - DNA, 15 bp, Homo sapiens
tgggaagccataacc

SEQ ID NO: 29526 - DNA, 15 bp, Homo sapiens
ttgggaagccataac

SEQ ID NO: 29527 - DNA, 15 bp, Homo sapiens
tttgggaagccataa

SEQ ID NO: 29528 - DNA, 15 bp, Homo sapiens
atttgggaagccata

SEQ ID NO: 29529 - DNA, 15 bp, Homo sapiens
catttgggaagccat

SEQ ID NO: 29530 - DNA, 15 bp, Homo sapiens
acatttgggaagcca

SEQ ID NO: 29531 - DNA, 15 bp, Homo sapiens
cacatttgggaagcc

SEQ ID NO: 29532 - DNA, 15 bp, Homo sapiens
tcacatttgggaagc

SEQ ID NO: 29533 - DNA, 15 bp, Homo sapiens
ctcacatttgggaag

SEQ ID NO: 29534 - DNA, 15 bp, Homo sapiens
actcacatttgggaa

SEQ ID NO: 29535 - DNA, 15 bp, Homo sapiens
aactcacatttggga

SEQ ID NO: 29536 - DNA, 15 bp, Homo sapiens
taactcacatttggg

SEQ ID NO: 29537 - DNA, 15 bp, Homo sapiens
ttaactcacatttgg

SEQ ID NO: 29538 - DNA, 15 bp, Homo sapiens
gttaactcacatttg

SEQ ID NO: 29539 - DNA, 15 bp, Homo sapiens
tgttaactcacattt

SEQ ID NO: 29540 - DNA, 15 bp, Homo sapiens
ctgttaactcacatt

SEQ ID NO: 29541 - DNA, 15 bp, Homo sapiens
gctgttaactcacat

SEQ ID NO: 29542 - DNA, 15 bp, Homo sapiens
ggctgttaactcaca

SEQ ID NO: 29543 - DNA, 15 bp, Homo sapiens
gggctgttaactcac

SEQ ID NO: 29544 - DNA, 15 bp, Homo sapiens
ggggctgttaactca

SEQ ID NO: 29545 - DNA, 15 bp, Homo sapiens
cggggctgttaactc

SEQ ID NO: 29546 - DNA, 15 bp, Homo sapiens
ccggggctgttaact

SEQ ID NO: 29547 - DNA, 15 bp, Homo sapiens
accggggctgttaac

SEQ ID NO: 29548 - DNA, 15 bp, Homo sapiens
caccggggctgttaa

SEQ ID NO: 29549 - DNA, 15 bp, Homo sapiens
gcaccggggctgtta

SEQ ID NO: 29550 - DNA, 15 bp, Homo sapiens
cgcaccggggctgtt

SEQ ID NO: 29551 - DNA, 15 bp, Homo sapiens
gcgcaccggggctgt

SEQ ID NO: 29552 - DNA, 15 bp, Homo sapiens
tgcgcaccggggctg

SEQ ID NO: 29553 - DNA, 15 bp, Homo sapiens
ctgcgcaccggggct

SEQ ID NO: 29554 - DNA, 15 bp, Homo sapiens
gctgcgcaccggggc

SEQ ID NO: 29555 - DNA, 15 bp, Homo sapiens
agctgcgcaccgggg

SEQ ID NO: 29556 - DNA, 15 bp, Homo sapiens
tagctgcgcaccggg

SEQ ID NO: 29557 - DNA, 15 bp, Homo sapiens
ctagctgcgcaccgg

SEQ ID NO: 29558 - DNA, 15 bp, Homo sapiens
cctagctgcgcaccg

SEQ ID NO: 29559 - DNA, 15 bp, Homo sapiens
acctagctgcgcacc

SEQ ID NO: 29560 - DNA, 15 bp, Homo sapiens
gacctagctgcgcac

SEQ ID NO: 29561 - DNA, 15 bp, Homo sapiens
cgacctagctgcgca

SEQ ID NO: 29562 - DNA, 15 bp, Homo sapiens
ccgacctagctgcgc

SEQ ID NO: 29563 - DNA, 15 bp, Homo sapiens
tccgacctagctgcg

SEQ ID NO: 29564 - DNA, 15 bp, Homo sapiens
ttccgacctagctgc

SEQ ID NO: 29565 - DNA, 15 bp, Homo sapiens
cttccgacctagctg

SEQ ID NO: 29566 - DNA, 15 bp, Homo sapiens
ccttccgacctagct

SEQ ID NO: 29567 - DNA, 15 bp, Homo sapiens
gccttccgacctagc

SEQ ID NO: 29568 - DNA, 15 bp, Homo sapiens
cgccttccgacctag

SEQ ID NO: 29569 - DNA, 15 bp, Homo sapiens
tcgccttccgaccta

SEQ ID NO: 29570 - DNA, 15 bp, Homo sapiens
ctcgccttccgacct

SEQ ID NO: 29571 - DNA, 15 bp, Homo sapiens
gctcgccttccgacc

SEQ ID NO: 29572 - DNA, 15 bp, Homo sapiens
ggctcgccttccgac

SEQ ID NO: 29573 - DNA, 15 bp, Homo sapiens
cggctcgccttccga

SEQ ID NO: 29574 - DNA, 15 bp, Homo sapiens
gcggctcgccttccg

SEQ ID NO: 29575 - DNA, 15 bp, Homo sapiens
cgcggctcgccttcc

SEQ ID NO: 29576 - DNA, 15 bp, Homo sapiens
ccgcggctcgccttc

SEQ ID NO: 29577 - DNA, 15 bp, Homo sapiens
tccgcggctcgcctt

SEQ ID NO: 29578 - DNA, 15 bp, Homo sapiens
ctccgcggctcgcct

SEQ ID NO: 29579 - DNA, 15 bp, Homo sapiens
tctccgcggctcgcc

SEQ ID NO: 29580 - DNA, 15 bp, Homo sapiens
ctctccgcggctcgc

SEQ ID NO: 29581 - DNA, 15 bp, Homo sapiens
gctctccgcggctcg

SEQ ID NO: 29582 - DNA, 15 bp, Homo sapiens
cgctctccgcggctc

SEQ ID NO: 29583 - DNA, 15 bp, Homo sapiens
ccgctctccgcggct

SEQ ID NO: 29584 - DNA, 15 bp, Homo sapiens
tccgctctccgcggc

SEQ ID NO: 29585 - DNA, 15 bp, Homo sapiens
ctccgctctccgcgg

SEQ ID NO: 29586 - DNA, 15 bp, Homo sapiens
gctccgctctccgcg

SEQ ID NO: 29587 - DNA, 15 bp, Homo sapiens
ggctccgctctccgc

SEQ ID NO: 29588 - DNA, 15 bp, Homo sapiens
cggctccgctctccg

SEQ ID NO: 29589 - DNA, 15 bp, Homo sapiens
gcggctccgctctcc

SEQ ID NO: 29590 - DNA, 15 bp, Homo sapiens
cgcggctccgctctc

SEQ ID NO: 29591 - DNA, 15 bp, Homo sapiens
ccgcggctccgctct

SEQ ID NO: 29592 - DNA, 15 bp, Homo sapiens
cccgcggctccgctc

SEQ ID NO: 29593 - DNA, 15 bp, Homo sapiens
gcccgcggctccgct

SEQ ID NO: 29594 - DNA, 15 bp, Homo sapiens
ggcccgcggctccgc

SEQ ID NO: 29595 - DNA, 15 bp, Homo sapiens
tggcccgcggctccg

SEQ ID NO: 29596 - DNA, 15 bp, Homo sapiens
ttggcccgcggctcc

SEQ ID NO: 29597 - DNA, 15 bp, Homo sapiens
cttggcccgcggctc

SEQ ID NO: 29598 - DNA, 15 bp, Homo sapiens
ccttggcccgcggct

SEQ ID NO: 29599 - DNA, 15 bp, Homo sapiens
gccttggcccgcggc

SEQ ID NO: 29600 - DNA, 15 bp, Homo sapiens
tgccttggcccgcgg

SEQ ID NO: 29601 - DNA, 15 bp, Homo sapiens
ctgccttggcccgcg

SEQ ID NO: 29602 - DNA, 15 bp, Homo sapiens
cctgccttggcccgc

SEQ ID NO: 29603 - DNA, 15 bp, Homo sapiens
ccctgccttggcccg

SEQ ID NO: 29604 - DNA, 15 bp, Homo sapiens
tccctgccttggccc

SEQ ID NO: 29605 - DNA, 15 bp, Homo sapiens
gtccctgccttggcc

SEQ ID NO: 29606 - DNA, 15 bp, Homo sapiens
cgtccctgccttggc

SEQ ID NO: 29607 - DNA, 15 bp, Homo sapiens
ccgtccctgccttgg

SEQ ID NO: 29608 - DNA, 15 bp, Homo sapiens
cccgtccctgccttg

SEQ ID NO: 29609 - DNA, 15 bp, Homo sapiens
tcccgtccctgcctt

SEQ ID NO: 29610 - DNA, 15 bp, Homo sapiens
ctcccgtccctgcct

SEQ ID NO: 29611 - DNA, 15 bp, Homo sapiens
cctcccgtccctgcc

SEQ ID NO: 29612 - DNA, 15 bp, Homo sapiens
ccctcccgtccctgc

SEQ ID NO: 29613 - DNA, 15 bp, Homo sapiens
cccctcccgtccctg

SEQ ID NO: 29614 - DNA, 15 bp, Homo sapiens
tcccctcccgtccct

SEQ ID NO: 29615 - DNA, 15 bp, Homo sapiens
ctcccctcccgtccc

SEQ ID NO: 29616 - DNA, 15 bp, Homo sapiens
cctcccctcccgtcc

SEQ ID NO: 29617 - DNA, 15 bp, Homo sapiens
gcctcccctcccgtc

SEQ ID NO: 29618 - DNA, 15 bp, Homo sapiens
cgcctcccctcccgt

SEQ ID NO: 29619 - DNA, 15 bp, Homo sapiens
ccgcctcccctcccg

SEQ ID NO: 29620 - DNA, 15 bp, Homo sapiens
gccgcctcccctccc

SEQ ID NO: 29621 - DNA, 15 bp, Homo sapiens
tgccgcctcccctcc

SEQ ID NO: 29622 - DNA, 15 bp, Homo sapiens
ctgccgcctcccctc

SEQ ID NO: 29623 - DNA, 15 bp, Homo sapiens
cctgccgcctcccct

SEQ ID NO: 29624 - DNA, 15 bp, Homo sapiens
acctgccgcctcccc

SEQ ID NO: 29625 - DNA, 15 bp, Homo sapiens
aacctgccgcctccc

SEQ ID NO: 29626 - DNA, 15 bp, Homo sapiens
caacctgccgcctcc

SEQ ID NO: 29627 - DNA, 15 bp, Homo sapiens
ccaacctgccgcctc

SEQ ID NO: 29628 - DNA, 15 bp, Homo sapiens
cccaacctgccgcct

SEQ ID NO: 29629 - DNA, 15 bp, Homo sapiens
gcccaacctgccgcc

SEQ ID NO: 29630 - DNA, 15 bp, Homo sapiens
cgcccaacctgccgc

SEQ ID NO: 29631 - DNA, 15 bp, Homo sapiens
gcgcccaacctgccg

SEQ ID NO: 29632 - DNA, 15 bp, Homo sapiens
agcgcccaacctgcc

SEQ ID NO: 29633 - DNA, 15 bp, Homo sapiens
gagcgcccaacctgc

SEQ ID NO: 29634 - DNA, 15 bp, Homo sapiens
ggagcgcccaacctg

SEQ ID NO: 29635 - DNA, 15 bp, Homo sapiens
cggagcgcccaacct

SEQ ID NO: 29636 - DNA, 15 bp, Homo sapiens
gcggagcgcccaacc

SEQ ID NO: 29637 - DNA, 15 bp, Homo sapiens
agcggagcgcccaac

SEQ ID NO: 29638 - DNA, 15 bp, Homo sapiens
cagcggagcgcccaa

SEQ ID NO: 29639 - DNA, 15 bp, Homo sapiens
gcagcggagcgccca

SEQ ID NO: 29640 - DNA, 15 bp, Homo sapiens
agcagcggagcgccc

SEQ ID NO: 29641 - DNA, 15 bp, Homo sapiens
cagcagcggagcgcc

SEQ ID NO: 29642 - DNA, 15 bp, Homo sapiens
gcagcagcggagcgc

SEQ ID NO: 29643 - DNA, 15 bp, Homo sapiens
agcagcagcggagcg

SEQ ID NO: 29644 - DNA, 15 bp, Homo sapiens
gagcagcagcggagc

SEQ ID NO: 29645 - DNA, 15 bp, Homo sapiens
cgagcagcagcggag

SEQ ID NO: 29646 - DNA, 15 bp, Homo sapiens
ccgagcagcagcgga

SEQ ID NO: 29647 - DNA, 15 bp, Homo sapiens
accgagcagcagcgg

SEQ ID NO: 29648 - DNA, 15 bp, Homo sapiens
caccgagcagcagcg

SEQ ID NO: 29649 - DNA, 15 bp, Homo sapiens
gcaccgagcagcagc

SEQ ID NO: 29650 - DNA, 15 bp, Homo sapiens
agcaccgagcagcag

SEQ ID NO: 29651 - DNA, 15 bp, Homo sapiens
cagcaccgagcagca

SEQ ID NO: 29652 - DNA, 15 bp, Homo sapiens
gcagcaccgagcagc

SEQ ID NO: 29653 - DNA, 15 bp, Homo sapiens
agcagcaccgagcag

SEQ ID NO: 29654 - DNA, 15 bp, Homo sapiens
aagcagcaccgagca

SEQ ID NO: 29655 - DNA, 15 bp, Homo sapiens
gaagcagcaccgagc

SEQ ID NO: 29656 - DNA, 15 bp, Homo sapiens
ggaagcagcaccgag

SEQ ID NO: 29657 - DNA, 15 bp, Homo sapiens
gggaagcagcaccga

SEQ ID NO: 29658 - DNA, 15 bp, Homo sapiens
ggggaagcagcaccg

SEQ ID NO: 29659 - DNA, 15 bp, Homo sapiens
cggggaagcagcacc

SEQ ID NO: 29660 - DNA, 15 bp, Homo sapiens
ccggggaagcagcac

SEQ ID NO: 29661 - DNA, 15 bp, Homo sapiens
tccggggaagcagca

SEQ ID NO: 29662 - DNA, 15 bp, Homo sapiens
ctccggggaagcagc

SEQ ID NO: 29663 - DNA, 15 bp, Homo sapiens
gctccggggaagcag

SEQ ID NO: 29664 - DNA, 15 bp, Homo sapiens
ggctccggggaagca

SEQ ID NO: 29665 - DNA, 15 bp, Homo sapiens
cggctccggggaagc

SEQ ID NO: 29666 - DNA, 15 bp, Homo sapiens
gcggctccggggaag

SEQ ID NO: 29667 - DNA, 15 bp, Homo sapiens
agcggctccggggaa

SEQ ID NO: 29668 - DNA, 15 bp, Homo sapiens
aagcggctccgggga

SEQ ID NO: 29669 - DNA, 15 bp, Homo sapiens
gaagcggctccgggg

SEQ ID NO: 29670 - DNA, 15 bp, Homo sapiens
ggaagcggctccggg

SEQ ID NO: 29671 - DNA, 15 bp, Homo sapiens
aggaagcggctccgg

SEQ ID NO: 29672 - DNA, 15 bp, Homo sapiens
gaggaagcggctccg

SEQ ID NO: 29673 - DNA, 15 bp, Homo sapiens
tgaggaagcggctcc

SEQ ID NO: 29674 - DNA, 15 bp, Homo sapiens
atgaggaagcggctc

SEQ ID NO: 29675 - DNA, 15 bp, Homo sapiens
gatgaggaagcggct

SEQ ID NO: 29676 - DNA, 15 bp, Homo sapiens
ggatgaggaagcggc

SEQ ID NO: 29677 - DNA, 15 bp, Homo sapiens
aggatgaggaagcgg

SEQ ID NO: 29678 - DNA, 15 bp, Homo sapiens
caggatgaggaagcg

SEQ ID NO: 29679 - DNA, 15 bp, Homo sapiens
gcaggatgaggaagc

SEQ ID NO: 29680 - DNA, 15 bp, Homo sapiens
cgcaggatgaggaag

SEQ ID NO: 29681 - DNA, 15 bp, Homo sapiens
ccgcaggatgaggaa

SEQ ID NO: 29682 - DNA, 15 bp, Homo sapiens
cccgcaggatgagga

SEQ ID NO: 29683 - DNA, 15 bp, Homo sapiens
ccccgcaggatgagg

SEQ ID NO: 29684 - DNA, 15 bp, Homo sapiens
cccccgcaggatgag

SEQ ID NO: 29685 - DNA, 15 bp, Homo sapiens
gcccccgcaggatga

SEQ ID NO: 29686 - DNA, 15 bp, Homo sapiens
agcccccgcaggatg

SEQ ID NO: 29687 - DNA, 15 bp, Homo sapiens
cagcccccgcaggat

SEQ ID NO: 29688 - DNA, 15 bp, Homo sapiens
gcagcccccgcagga

SEQ ID NO: 29689 - DNA, 15 bp, Homo sapiens
ggcagcccccgcagg

SEQ ID NO: 29690 - DNA, 15 bp, Homo sapiens
gggcagcccccgcag

SEQ ID NO: 29691 - DNA, 15 bp, Homo sapiens
ggggcagcccccgca

SEQ ID NO: 29692 - DNA, 15 bp, Homo sapiens
cggggcagcccccgc

SEQ ID NO: 29693 - DNA, 15 bp, Homo sapiens
gcggggcagcccccg

SEQ ID NO: 29694 - DNA, 15 bp, Homo sapiens
ggcggggcagccccc

SEQ ID NO: 29695 - DNA, 15 bp, Homo sapiens
cggcggggcagcccc

SEQ ID NO: 29696 - DNA, 15 bp, Homo sapiens
gcggcggggcagccc

SEQ ID NO: 29697 - DNA, 15 bp, Homo sapiens
ggcggcggggcagcc

SEQ ID NO: 29698 - DNA, 15 bp, Homo sapiens
cggcggcggggcagc

SEQ ID NO: 29699 - DNA, 15 bp, Homo sapiens
ccggcggcggggcag

SEQ ID NO: 29700 - DNA, 15 bp, Homo sapiens
cccggcggcggggca

SEQ ID NO: 29701 - DNA, 15 bp, Homo sapiens
ccccggcggcggggc

SEQ ID NO: 29702 - DNA, 15 bp, Homo sapiens
accccggcggcgggg

SEQ ID NO: 29703 - DNA, 15 bp, Homo sapiens
caccccggcggcggg

SEQ ID NO: 29704 - DNA, 15 bp, Homo sapiens
gcaccccggcggcgg

SEQ ID NO: 29705 - DNA, 15 bp, Homo sapiens
ggcaccccggcggcg

SEQ ID NO: 29706 - DNA, 15 bp, Homo sapiens
cggcaccccggcggc

SEQ ID NO: 29707 - DNA, 15 bp, Homo sapiens
ccggcaccccggcgg

SEQ ID NO: 29708 - DNA, 15 bp, Homo sapiens
cccggcaccccggcg

SEQ ID NO: 29709 - DNA, 15 bp, Homo sapiens
ccccggcaccccggc

SEQ ID NO: 29710 - DNA, 15 bp, Homo sapiens
accccggcaccccgg

SEQ ID NO: 29711 - DNA, 15 bp, Homo sapiens
caccccggcaccccg

SEQ ID NO: 29712 - DNA, 15 bp, Homo sapiens
tcaccccggcacccc

SEQ ID NO: 29713 - DNA, 15 bp, Homo sapiens
ctcaccccggcaccc

SEQ ID NO: 29714 - DNA, 15 bp, Homo sapiens
gctcaccccggcacc

SEQ ID NO: 29715 - DNA, 15 bp, Homo sapiens
cgctcaccccggcac

SEQ ID NO: 29716 - DNA, 15 bp, Homo sapiens
gcgctcaccccggca

SEQ ID NO: 29717 - DNA, 15 bp, Homo sapiens
cgcgctcaccccggc

SEQ ID NO: 29718 - DNA, 15 bp, Homo sapiens
ccgcgctcaccccgg

SEQ ID NO: 29719 - DNA, 15 bp, Homo sapiens
gccgcgctcaccccg

SEQ ID NO: 29720 - DNA, 15 bp, Homo sapiens
cgccgcgctcacccc

SEQ ID NO: 29721 - DNA, 15 bp, Homo sapiens
ccgccgcgctcaccc

SEQ ID NO: 29722 - DNA, 15 bp, Homo sapiens
cccgccgcgctcacc

SEQ ID NO: 29723 - DNA, 15 bp, Homo sapiens
tcccgccgcgctcac

SEQ ID NO: 29724 - DNA, 15 bp, Homo sapiens
ctcccgccgcgctca

SEQ ID NO: 29725 - DNA, 15 bp, Homo sapiens
gctcccgccgcgctc

SEQ ID NO: 29726 - DNA, 15 bp, Homo sapiens
ggctcccgccgcgct

SEQ ID NO: 29727 - DNA, 15 bp, Homo sapiens
tggctcccgccgcgc

SEQ ID NO: 29728 - DNA, 15 bp, Homo sapiens
ctggctcccgccgcg

SEQ ID NO: 29729 - DNA, 15 bp, Homo sapiens
cctggctcccgccgc

SEQ ID NO: 29730 - DNA, 15 bp, Homo sapiens
ccctggctcccgccg

SEQ ID NO: 29731 - DNA, 15 bp, Homo sapiens
gccctggctcccgcc

SEQ ID NO: 29732 - DNA, 15 bp, Homo sapiens
agccctggctcccgc

SEQ ID NO: 29733 - DNA, 15 bp, Homo sapiens
cagccctggctcccg

SEQ ID NO: 29734 - DNA, 15 bp, Homo sapiens
ccagccctggctccc

SEQ ID NO: 29735 - DNA, 15 bp, Homo sapiens
cccagccctggctcc

SEQ ID NO: 29736 - DNA, 15 bp, Homo sapiens
ccccagccctggctc

SEQ ID NO: 29737 - DNA, 15 bp, Homo sapiens
accccagccctggct

SEQ ID NO: 29738 - DNA, 15 bp, Homo sapiens
caccccagccctggc

SEQ ID NO: 29739 - DNA, 15 bp, Homo sapiens
ccaccccagccctgg

SEQ ID NO: 29740 - DNA, 15 bp, Homo sapiens
gccaccccagccctg

SEQ ID NO: 29741 - DNA, 15 bp, Homo sapiens
cgccaccccagccct

SEQ ID NO: 29742 - DNA, 15 bp, Homo sapiens
tcgccaccccagccc

SEQ ID NO: 29743 - DNA, 15 bp, Homo sapiens
ttcgccaccccagcc

SEQ ID NO: 29744 - DNA, 15 bp, Homo sapiens
gttcgccaccccagc

SEQ ID NO: 29745 - DNA, 15 bp, Homo sapiens
ggttcgccaccccag

SEQ ID NO: 29746 - DNA, 15 bp, Homo sapiens
aggttcgccacccca

SEQ ID NO: 29747 - DNA, 15 bp, Homo sapiens
gaggttcgccacccc

SEQ ID NO: 29748 - DNA, 15 bp, Homo sapiens
cgaggttcgccaccc

SEQ ID NO: 29749 - DNA, 15 bp, Homo sapiens
ccgaggttcgccacc

SEQ ID NO: 29750 - DNA, 15 bp, Homo sapiens
tccgaggttcgccac

SEQ ID NO: 29751 - DNA, 15 bp, Homo sapiens
ctccgaggttcgcca

SEQ ID NO: 29752 - DNA, 15 bp, Homo sapiens
cctccgaggttcgcc

SEQ ID NO: 29753 - DNA, 15 bp, Homo sapiens
ccctccgaggttcgc

SEQ ID NO: 29754 - DNA, 15 bp, Homo sapiens
cccctccgaggttcg

SEQ ID NO: 29755 - DNA, 15 bp, Homo sapiens
ccccctccgaggttc

SEQ ID NO: 29756 - DNA, 15 bp, Homo sapiens
gccccctccgaggtt

SEQ ID NO: 29757 - DNA, 15 bp, Homo sapiens
agccccctccgaggt

SEQ ID NO: 29758 - DNA, 15 bp, Homo sapiens
gagccccctccgagg

SEQ ID NO: 29759 - DNA, 15 bp, Homo sapiens
agagccccctccgag

SEQ ID NO: 29760 - DNA, 15 bp, Homo sapiens
gagagccccctccga

SEQ ID NO: 29761 - DNA, 15 bp, Homo sapiens
ggagagccccctccg

SEQ ID NO: 29762 - DNA, 15 bp, Homo sapiens
gggagagccccctcc

SEQ ID NO: 29763 - DNA, 15 bp, Homo sapiens
tgggagagccccctc

SEQ ID NO: 29764 - DNA, 15 bp, Homo sapiens
ctgggagagccccct

SEQ ID NO: 29765 - DNA, 15 bp, Homo sapiens
cctgggagagccccc

SEQ ID NO: 29766 - DNA, 15 bp, Homo sapiens
tcctgggagagcccc

SEQ ID NO: 29767 - DNA, 15 bp, Homo sapiens
ttcctgggagagccc

SEQ ID NO: 29768 - DNA, 15 bp, Homo sapiens
cttcctgggagagcc

SEQ ID NO: 29769 - DNA, 15 bp, Homo sapiens
gcttcctgggagagc

SEQ ID NO: 29770 - DNA, 15 bp, Homo sapiens
ggcttcctgggagag

SEQ ID NO: 29771 - DNA, 15 bp, Homo sapiens
gggcttcctgggaga

SEQ ID NO: 29772 - DNA, 15 bp, Homo sapiens
agggcttcctgggag

SEQ ID NO: 29773 - DNA, 15 bp, Homo sapiens
cagggcttcctggga

SEQ ID NO: 29774 - DNA, 15 bp, Homo sapiens
gcagggcttcctggg

SEQ ID NO: 29775 - DNA, 15 bp, Homo sapiens
cgcagggcttcctgg

SEQ ID NO: 29776 - DNA, 15 bp, Homo sapiens
ccgcagggcttcctg

SEQ ID NO: 29777 - DNA, 15 bp, Homo sapiens
accgcagggcttcct

SEQ ID NO: 29778 - DNA, 15 bp, Homo sapiens
aaccgcagggcttcc

SEQ ID NO: 29779 - DNA, 15 bp, Homo sapiens
taaccgcagggcttc

SEQ ID NO: 29780 - DNA, 15 bp, Homo sapiens
ctaaccgcagggctt

SEQ ID NO: 29781 - DNA, 15 bp, Homo sapiens
gctaaccgcagggct

SEQ ID NO: 29782 - DNA, 15 bp, Homo sapiens
cgctaaccgcagggc

SEQ ID NO: 29783 - DNA, 15 bp, Homo sapiens
gcgctaaccgcaggg

SEQ ID NO: 29784 - DNA, 15 bp, Homo sapiens
ggcgctaaccgcagg

SEQ ID NO: 29785 - DNA, 15 bp, Homo sapiens
gggcgctaaccgcag

SEQ ID NO: 29786 - DNA, 15 bp, Homo sapiens
cgggcgctaaccgca

SEQ ID NO: 29787 - DNA, 15 bp, Homo sapiens
gcgggcgctaaccgc

SEQ ID NO: 29788 - DNA, 15 bp, Homo sapiens
cgcgggcgctaaccg

SEQ ID NO: 29789 - DNA, 15 bp, Homo sapiens
gcgcgggcgctaacc

SEQ ID NO: 29790 - DNA, 15 bp, Homo sapiens
agcgcgggcgctaac

SEQ ID NO: 29791 - DNA, 15 bp, Homo sapiens
aagcgcgggcgctaa

SEQ ID NO: 29792 - DNA, 15 bp, Homo sapiens
gaagcgcgggcgcta

SEQ ID NO: 29793 - DNA, 15 bp, Homo sapiens
ggaagcgcgggcgct

SEQ ID NO: 29794 - DNA, 15 bp, Homo sapiens
gggaagcgcgggcgc

SEQ ID NO: 29795 - DNA, 15 bp, Homo sapiens
ggggaagcgcgggcg

SEQ ID NO: 29796 - DNA, 15 bp, Homo sapiens
tggggaagcgcgggc

SEQ ID NO: 29797 - DNA, 15 bp, Homo sapiens
gtggggaagcgcggg

SEQ ID NO: 29798 - DNA, 15 bp, Homo sapiens
ggtggggaagcgcgg

SEQ ID NO: 29799 - DNA, 15 bp, Homo sapiens
tggtggggaagcgcg

SEQ ID NO: 29800 - DNA, 15 bp, Homo sapiens
ctggtggggaagcgc

SEQ ID NO: 29801 - DNA, 15 bp, Homo sapiens
actggtggggaagcg

SEQ ID NO: 29802 - DNA, 15 bp, Homo sapiens
cactggtggggaagc

SEQ ID NO: 29803 - DNA, 15 bp, Homo sapiens
ccactggtggggaag

SEQ ID NO: 29804 - DNA, 15 bp, Homo sapiens
gccactggtggggaa

SEQ ID NO: 29805 - DNA, 15 bp, Homo sapiens
agccactggtgggga

SEQ ID NO: 29806 - DNA, 15 bp, Homo sapiens
cagccactggtgggg

SEQ ID NO: 29807 - DNA, 15 bp, Homo sapiens
gcagccactggtggg

SEQ ID NO: 29808 - DNA, 15 bp, Homo sapiens
cgcagccactggtgg

SEQ ID NO: 29809 - DNA, 15 bp, Homo sapiens
gcgcagccactggtg

SEQ ID NO: 29810 - DNA, 15 bp, Homo sapiens
tgcgcagccactggt

SEQ ID NO: 29811 - DNA, 15 bp, Homo sapiens
ttgcgcagccactgg

SEQ ID NO: 29812 - DNA, 15 bp, Homo sapiens
cttgcgcagccactg

SEQ ID NO: 29813 - DNA, 15 bp, Homo sapiens
gcttgcgcagccact

SEQ ID NO: 29814 - DNA, 15 bp, Homo sapiens
agcttgcgcagccac

SEQ ID NO: 29815 - DNA, 15 bp, Homo sapiens
cagcttgcgcagcca

SEQ ID NO: 29816 - DNA, 15 bp, Homo sapiens
ccagcttgcgcagcc

SEQ ID NO: 29817 - DNA, 15 bp, Homo sapiens
cccagcttgcgcagc

SEQ ID NO: 29818 - DNA, 15 bp, Homo sapiens
tcccagcttgcgcag

SEQ ID NO: 29819 - DNA, 15 bp, Homo sapiens
ttcccagcttgcgca

SEQ ID NO: 29820 - DNA, 15 bp, Homo sapiens
cttcccagcttgcgc

SEQ ID NO: 29821 - DNA, 15 bp, Homo sapiens
gcttcccagcttgcg

SEQ ID NO: 29822 - DNA, 15 bp, Homo sapiens
cgcttcccagcttgc

SEQ ID NO: 29823 - DNA, 15 bp, Homo sapiens
tcgcttcccagcttg

SEQ ID NO: 29824 - DNA, 15 bp, Homo sapiens
ttcgcttcccagctt

SEQ ID NO: 29825 - DNA, 15 bp, Homo sapiens
cttcgcttcccagct

SEQ ID NO: 29826 - DNA, 15 bp, Homo sapiens
tcttcgcttcccagc

SEQ ID NO: 29827 - DNA, 15 bp, Homo sapiens
ctcttcgcttcccag

SEQ ID NO: 29828 - DNA, 15 bp, Homo sapiens
cctcttcgcttccca

SEQ ID NO: 29829 - DNA, 15 bp, Homo sapiens
acctcttcgcttccc

SEQ ID NO: 29830 - DNA, 15 bp, Homo sapiens
gacctcttcgcttcc

SEQ ID NO: 29831 - DNA, 15 bp, Homo sapiens
tgacctcttcgcttc

SEQ ID NO: 29832 - DNA, 15 bp, Homo sapiens
gtgacctcttcgctt

SEQ ID NO: 29833 - DNA, 15 bp, Homo sapiens
cgtgacctcttcgct

SEQ ID NO: 29834 - DNA, 15 bp, Homo sapiens
acgtgacctcttcgc

SEQ ID NO: 29835 - DNA, 15 bp, Homo sapiens
cacgtgacctcttcg

SEQ ID NO: 29836 - DNA, 15 bp, Homo sapiens
acacgtgacctcttc

SEQ ID NO: 29837 - DNA, 15 bp, Homo sapiens
aacacgtgacctctt

SEQ ID NO: 29838 - DNA, 15 bp, Homo sapiens
caacacgtgacctct

SEQ ID NO: 29839 - DNA, 15 bp, Homo sapiens
ccaacacgtgacctc

SEQ ID NO: 29840 - DNA, 15 bp, Homo sapiens
gccaacacgtgacct

SEQ ID NO: 29841 - DNA, 15 bp, Homo sapiens
cgccaacacgtgacc

SEQ ID NO: 29842 - DNA, 15 bp, Homo sapiens
ccgccaacacgtgac

SEQ ID NO: 29843 - DNA, 15 bp, Homo sapiens
tccgccaacacgtga

SEQ ID NO: 29844 - DNA, 15 bp, Homo sapiens
ttccgccaacacgtg

SEQ ID NO: 29845 - DNA, 15 bp, Homo sapiens
tttccgccaacacgt

SEQ ID NO: 29846 - DNA, 15 bp, Homo sapiens
ctttccgccaacacg

SEQ ID NO: 29847 - DNA, 15 bp, Homo sapiens
actttccgccaacac

SEQ ID NO: 29848 - DNA, 15 bp, Homo sapiens
tactttccgccaaca

SEQ ID NO: 29849 - DNA, 15 bp, Homo sapiens
ttactttccgccaac

SEQ ID NO: 29850 - DNA, 15 bp, Homo sapiens
gttactttccgccaa

SEQ ID NO: 29851 - DNA, 15 bp, Homo sapiens
agttactttccgcca

SEQ ID NO: 29852 - DNA, 15 bp, Homo sapiens
aagttactttccgcc

SEQ ID NO: 29853 - DNA, 15 bp, Homo sapiens
caagttactttccgc

SEQ ID NO: 29854 - DNA, 15 bp, Homo sapiens
ccaagttactttccg

SEQ ID NO: 29855 - DNA, 15 bp, Homo sapiens
tccaagttactttcc

SEQ ID NO: 29856 - DNA, 15 bp, Homo sapiens
ctccaagttactttc

SEQ ID NO: 29857 - DNA, 15 bp, Homo sapiens
cctccaagttacttt

SEQ ID NO: 29858 - DNA, 15 bp, Homo sapiens
gcctccaagttactt

SEQ ID NO: 29859 - DNA, 15 bp, Homo sapiens
cgcctccaagttact

SEQ ID NO: 29860 - DNA, 15 bp, Homo sapiens
tcgcctccaagttac

SEQ ID NO: 29861 - DNA, 15 bp, Homo sapiens
ttcgcctccaagtta

SEQ ID NO: 29862 - DNA, 15 bp, Homo sapiens
tttcgcctccaagtt

SEQ ID NO: 29863 - DNA, 15 bp, Homo sapiens
ctttcgcctccaagt

SEQ ID NO: 29864 - DNA, 15 bp, Homo sapiens
cctttcgcctccaag

SEQ ID NO: 29865 - DNA, 15 bp, Homo sapiens
tcctttcgcctccaa

SEQ ID NO: 29866 - DNA, 15 bp, Homo sapiens
atcctttcgcctcca

SEQ ID NO: 29867 - DNA, 15 bp, Homo sapiens
catcctttcgcctcc

SEQ ID NO: 29868 - DNA, 15 bp, Homo sapiens
tcatcctttcgcctc

SEQ ID NO: 29869 - DNA, 15 bp, Homo sapiens
ttcatcctttcgcct

SEQ ID NO: 29870 - DNA, 15 bp, Homo sapiens
gttcatcctttcgcc

SEQ ID NO: 29871 - DNA, 15 bp, Homo sapiens
agttcatcctttcgc

SEQ ID NO: 29872 - DNA, 15 bp, Homo sapiens
aagttcatcctttcg

SEQ ID NO: 29873 - DNA, 15 bp, Homo sapiens
aaagttcatcctttc

SEQ ID NO: 29874 - DNA, 15 bp, Homo sapiens
caaagttcatccttt

SEQ ID NO: 29875 - DNA, 15 bp, Homo sapiens
tcaaagttcatcctt

SEQ ID NO: 29876 - DNA, 15 bp, Homo sapiens
ctcaaagttcatcct

SEQ ID NO: 29877 - DNA, 15 bp, Homo sapiens
tctcaaagttcatcc

SEQ ID NO: 29878 - DNA, 15 bp, Homo sapiens
ttctcaaagttcatc

SEQ ID NO: 29879 - DNA, 15 bp, Homo sapiens
cttctcaaagttcat

SEQ ID NO: 29880 - DNA, 15 bp, Homo sapiens
tcttctcaaagttca

SEQ ID NO: 29881 - DNA, 15 bp, Homo sapiens
ctcttctcaaagttc

SEQ ID NO: 29882 - DNA, 15 bp, Homo sapiens
cctcttctcaaagtt

SEQ ID NO: 29883 - DNA, 15 bp, Homo sapiens
tcctcttctcaaagt

SEQ ID NO: 29884 - DNA, 15 bp, Homo sapiens
ttcctcttctcaaag

SEQ ID NO: 29885 - DNA, 15 bp, Homo sapiens
tttcctcttctcaaa

SEQ ID NO: 29886 - DNA, 15 bp, Homo sapiens
ttttcctcttctcaa

SEQ ID NO: 29887 - DNA, 15 bp, Homo sapiens
tttttcctcttctca

SEQ ID NO: 29888 - DNA, 15 bp, Homo sapiens
ttttttcctcttctc

SEQ ID NO: 29889 - DNA, 15 bp, Homo sapiens
tttttttcctcttct

SEQ ID NO: 29890 - DNA, 15 bp, Homo sapiens
ctttttttcctcttc

SEQ ID NO: 29891 - DNA, 15 bp, Homo sapiens
gctttttttcctctt

SEQ ID NO: 29892 - DNA, 15 bp, Homo sapiens
tgctttttttcctct

SEQ ID NO: 29893 - DNA, 15 bp, Homo sapiens
gtgctttttttcctc

SEQ ID NO: 29894 - DNA, 15 bp, Homo sapiens
tgtgctttttttcct

SEQ ID NO: 29895 - DNA, 15 bp, Homo sapiens
ttgtgctttttttcc

SEQ ID NO: 29896 - DNA, 15 bp, Homo sapiens
attgtgctttttttc

SEQ ID NO: 29897 - DNA, 15 bp, Homo sapiens
cattgtgcttttttt

SEQ ID NO: 29898 - DNA, 15 bp, Homo sapiens
tcattgtgctttttt

SEQ ID NO: 29899 - DNA, 15 bp, Homo sapiens
ttcattgtgcttttt

SEQ ID NO: 29900 - DNA, 15 bp, Homo sapiens
tttcattgtgctttt

SEQ ID NO: 29901 - DNA, 15 bp, Homo sapiens
gtttcattgtgcttt

SEQ ID NO: 29902 - DNA, 15 bp, Homo sapiens
tgtttcattgtgctt

SEQ ID NO: 29903 - DNA, 15 bp, Homo sapiens
ttgtttcattgtgct

SEQ ID NO: 29904 - DNA, 15 bp, Homo sapiens
tttgtttcattgtgc

SEQ ID NO: 29905 - DNA, 15 bp, Homo sapiens
gtttgtttcattgtg

SEQ ID NO: 29906 - DNA, 15 bp, Homo sapiens
agtttgtttcattgt

SEQ ID NO: 29907 - DNA, 15 bp, Homo sapiens
tagtttgtttcattg

SEQ ID NO: 29908 - DNA, 15 bp, Homo sapiens
gtagtttgtttcatt

SEQ ID NO: 29909 - DNA, 15 bp, Homo sapiens
ggtagtttgtttcat

SEQ ID NO: 29910 - DNA, 15 bp, Homo sapiens
gggtagtttgtttca

SEQ ID NO: 29911 - DNA, 15 bp, Homo sapiens
ggggtagtttgtttc

SEQ ID NO: 29912 - DNA, 15 bp, Homo sapiens
gggggtagtttgttt

SEQ ID NO: 29913 - DNA, 15 bp, Homo sapiens
agggggtagtttgtt

SEQ ID NO: 29914 - DNA, 15 bp, Homo sapiens
aagggggtagtttgt

SEQ ID NO: 29915 - DNA, 15 bp, Homo sapiens
caagggggtagtttg

SEQ ID NO: 29916 - DNA, 15 bp, Homo sapiens
ccaagggggtagttt

SEQ ID NO: 29917 - DNA, 15 bp, Homo sapiens
tccaagggggtagtt

SEQ ID NO: 29918 - DNA, 15 bp, Homo sapiens
ctccaagggggtagt

SEQ ID NO: 29919 - DNA, 15 bp, Homo sapiens
actccaagggggtag

SEQ ID NO: 29920 - DNA, 15 bp, Homo sapiens
cactccaagggggta

SEQ ID NO: 29921 - DNA, 15 bp, Homo sapiens
acactccaagggggt

SEQ ID NO: 29922 - DNA, 15 bp, Homo sapiens
gacactccaaggggg

SEQ ID NO: 29923 - DNA, 15 bp, Homo sapiens
agacactccaagggg

SEQ ID NO: 29924 - DNA, 15 bp, Homo sapiens
tagacactccaaggg

SEQ ID NO: 29925 - DNA, 15 bp, Homo sapiens
ttagacactccaagg

SEQ ID NO: 29926 - DNA, 15 bp, Homo sapiens
attagacactccaag

SEQ ID NO: 29927 - DNA, 15 bp, Homo sapiens
tattagacactccaa

SEQ ID NO: 29928 - DNA, 15 bp, Homo sapiens
ctattagacactcca

SEQ ID NO: 29929 - DNA, 15 bp, Homo sapiens
tctattagacactcc

SEQ ID NO: 29930 - DNA, 15 bp, Homo sapiens
ctctattagacactc

SEQ ID NO: 29931 - DNA, 15 bp, Homo sapiens
cctctattagacact

SEQ ID NO: 29932 - DNA, 15 bp, Homo sapiens
ccctctattagacac

SEQ ID NO: 29933 - DNA, 15 bp, Homo sapiens
cccctctattagaca

SEQ ID NO: 29934 - DNA, 15 bp, Homo sapiens
ccccctctattagac

SEQ ID NO: 29935 - DNA, 15 bp, Homo sapiens
tccccctctattaga

SEQ ID NO: 29936 - DNA, 15 bp, Homo sapiens
ctccccctctattag

SEQ ID NO: 29937 - DNA, 15 bp, Homo sapiens
cctccccctctatta

SEQ ID NO: 29938 - DNA, 15 bp, Homo sapiens
gcctccccctctatt

SEQ ID NO: 29939 - DNA, 15 bp, Homo sapiens
cgcctccccctctat

SEQ ID NO: 29940 - DNA, 15 bp, Homo sapiens
ccgcctccccctcta

SEQ ID NO: 29941 - DNA, 15 bp, Homo sapiens
cccgcctccccctct

SEQ ID NO: 29942 - DNA, 15 bp, Homo sapiens
tcccgcctccccctc

SEQ ID NO: 29943 - DNA, 15 bp, Homo sapiens
ctcccgcctccccct

SEQ ID NO: 29944 - DNA, 15 bp, Homo sapiens
cctcccgcctccccc

SEQ ID NO: 29945 - DNA, 15 bp, Homo sapiens
ccctcccgcctcccc

SEQ ID NO: 29946 - DNA, 15 bp, Homo sapiens
cccctcccgcctccc

SEQ ID NO: 29947 - DNA, 15 bp, Homo sapiens
ccccctcccgcctcc

SEQ ID NO: 29948 - DNA, 15 bp, Homo sapiens
cccccctcccgcctc

SEQ ID NO: 29949 - DNA, 15 bp, Homo sapiens
ccccccctcccgcct

SEQ ID NO: 29950 - DNA, 15 bp, Homo sapiens
gccccccctcccgcc

SEQ ID NO: 29951 - DNA, 15 bp, Homo sapiens
cgccccccctcccgc

SEQ ID NO: 29952 - DNA, 15 bp, Homo sapiens
ccgccccccctcccg

SEQ ID NO: 29953 - DNA, 15 bp, Homo sapiens
tccgccccccctccc

SEQ ID NO: 29954 - DNA, 15 bp, Homo sapiens
ctccgccccccctcc

SEQ ID NO: 29955 - DNA, 15 bp, Homo sapiens
cctccgccccccctc

SEQ ID NO: 29956 - DNA, 15 bp, Homo sapiens
ccctccgccccccct

SEQ ID NO: 29957 - DNA, 15 bp, Homo sapiens
cccctccgccccccc

SEQ ID NO: 29958 - DNA, 15 bp, Homo sapiens
gcccctccgcccccc

SEQ ID NO: 29959 - DNA, 15 bp, Homo sapiens
cgcccctccgccccc

SEQ ID NO: 29960 - DNA, 15 bp, Homo sapiens
gcgcccctccgcccc

SEQ ID NO: 29961 - DNA, 15 bp, Homo sapiens
ggcgcccctccgccc

SEQ ID NO: 29962 - DNA, 15 bp, Homo sapiens
cggcgcccctccgcc

SEQ ID NO: 29963 - DNA, 15 bp, Homo sapiens
gcggcgcccctccgc

SEQ ID NO: 29964 - DNA, 15 bp, Homo sapiens
agcggcgcccctccg

SEQ ID NO: 29965 - DNA, 15 bp, Homo sapiens
gagcggcgcccctcc

SEQ ID NO: 29966 - DNA, 15 bp, Homo sapiens
agagcggcgcccctc

SEQ ID NO: 29967 - DNA, 15 bp, Homo sapiens
gagagcggcgcccct

SEQ ID NO: 29968 - DNA, 15 bp, Homo sapiens
ggagagcggcgcccc

SEQ ID NO: 29969 - DNA, 15 bp, Homo sapiens
cggagagcggcgccc

SEQ ID NO: 29970 - DNA, 15 bp, Homo sapiens
gcggagagcggcgcc

SEQ ID NO: 29971 - DNA, 15 bp, Homo sapiens
cgcggagagcggcgc

SEQ ID NO: 29972 - DNA, 15 bp, Homo sapiens
ccgcggagagcggcg

SEQ ID NO: 29973 - DNA, 15 bp, Homo sapiens
cccgcggagagcggc

SEQ ID NO: 29974 - DNA, 15 bp, Homo sapiens
tcccgcggagagcgg

SEQ ID NO: 29975 - DNA, 15 bp, Homo sapiens
ctcccgcggagagcg

SEQ ID NO: 29976 - DNA, 15 bp, Homo sapiens
tctcccgcggagagc

SEQ ID NO: 29977 - DNA, 15 bp, Homo sapiens
atctcccgcggagag

SEQ ID NO: 29978 - DNA, 15 bp, Homo sapiens
catctcccgcggaga

SEQ ID NO: 29979 - DNA, 15 bp, Homo sapiens
acatctcccgcggag

SEQ ID NO: 29980 - DNA, 15 bp, Homo sapiens
cacatctcccgcgga

SEQ ID NO: 29981 - DNA, 15 bp, Homo sapiens
ccacatctcccgcgg

SEQ ID NO: 29982 - DNA, 15 bp, Homo sapiens
cccacatctcccgcg

SEQ ID NO: 29983 - DNA, 15 bp, Homo sapiens
ccccacatctcccgc

SEQ ID NO: 29984 - DNA, 15 bp, Homo sapiens
tccccacatctcccg

SEQ ID NO: 29985 - DNA, 15 bp, Homo sapiens
gtccccacatctccc

SEQ ID NO: 29986 - DNA, 15 bp, Homo sapiens
cgtccccacatctcc

SEQ ID NO: 29987 - DNA, 15 bp, Homo sapiens
tcgtccccacatctc

SEQ ID NO: 29988 - DNA, 15 bp, Homo sapiens
gtcgtccccacatct

SEQ ID NO: 29989 - DNA, 15 bp, Homo sapiens
agtcgtccccacatc

SEQ ID NO: 29990 - DNA, 15 bp, Homo sapiens
gagtcgtccccacat

SEQ ID NO: 29991 - DNA, 15 bp, Homo sapiens
ggagtcgtccccaca

SEQ ID NO: 29992 - DNA, 15 bp, Homo sapiens
cggagtcgtccccac

SEQ ID NO: 29993 - DNA, 15 bp, Homo sapiens
ccggagtcgtcccca

SEQ ID NO: 29994 - DNA, 15 bp, Homo sapiens
tccggagtcgtcccc

SEQ ID NO: 29995 - DNA, 15 bp, Homo sapiens
ttccggagtcgtccc

SEQ ID NO: 29996 - DNA, 15 bp, Homo sapiens
tttccggagtcgtcc

SEQ ID NO: 29997 - DNA, 15 bp, Homo sapiens
atttccggagtcgtc

SEQ ID NO: 29998 - DNA, 15 bp, Homo sapiens
gatttccggagtcgt

SEQ ID NO: 29999 - DNA, 15 bp, Homo sapiens
agatttccggagtcg

SEQ ID NO: 30000 - DNA, 15 bp, Homo sapiens
gagatttccggagtc

SEQ ID NO: 30001 - DNA, 15 bp, Homo sapiens
cgagatttccggagt

SEQ ID NO: 30002 - DNA, 15 bp, Homo sapiens
ccgagatttccggag

SEQ ID NO: 30003 - DNA, 15 bp, Homo sapiens
gctgggattacaggc

SEQ ID NO: 30004 - DNA, 15 bp, Homo sapiens
tgctgggattacagg

SEQ ID NO: 30005 - DNA, 15 bp, Homo sapiens
gtgctgggattacag

SEQ ID NO: 30006 - DNA, 15 bp, Homo sapiens
agtgctgggattaca

SEQ ID NO: 30007 - DNA, 15 bp, Homo sapiens
aagtgctgggattac

SEQ ID NO: 30008 - DNA, 15 bp, Homo sapiens
aaagtgctgggatta

SEQ ID NO: 30009 - DNA, 15 bp, Homo sapiens
caaagtgctgggatt

SEQ ID NO: 30010 - DNA, 15 bp, Homo sapiens
ccaaagtgctgggat

SEQ ID NO: 30011 - DNA, 15 bp, Homo sapiens
cccaaagtgctggga

SEQ ID NO: 30012 - DNA, 15 bp, Homo sapiens
tcccaaagtgctggg

SEQ ID NO: 30013 - DNA, 15 bp, Homo sapiens
ttttttttagtagag

SEQ ID NO: 30014 - DNA, 15 bp, Homo sapiens
ttttgtatttttttt

SEQ ID NO: 30015 - DNA, 15 bp, Homo sapiens
tttttgtattttttt

SEQ ID NO: 30016 - DNA, 15 bp, Homo sapiens
aatttttgtattttt

SEQ ID NO: 30017 - DNA, 15 bp, Homo sapiens
taatttttgtatttt

SEQ ID NO: 30018 - DNA, 15 bp, Homo sapiens
ctaatttttgtattt

SEQ ID NO: 30019 - DNA, 15 bp, Homo sapiens
gctaatttttgtatt

SEQ ID NO: 30020 - DNA, 15 bp, Homo sapiens
ggctaatttttgtat

SEQ ID NO: 30021 - DNA, 15 bp, Homo sapiens
agctgggattacagg

SEQ ID NO: 30022 - DNA, 15 bp, Homo sapiens
tagctgggattacag

SEQ ID NO: 30023 - DNA, 15 bp, Homo sapiens
gtagctgggattaca

SEQ ID NO: 30024 - DNA, 15 bp, Homo sapiens
agtagctgggattac

SEQ ID NO: 30025 - DNA, 15 bp, Homo sapiens
caacctccacctcct

SEQ ID NO: 30026 - DNA, 15 bp, Homo sapiens
gctcactgcaacctc

SEQ ID NO: 30027 - DNA, 15 bp, Homo sapiens
ctggagtgcagtggc

SEQ ID NO: 30028 - DNA, 15 bp, Homo sapiens
gctggagtgcagtgg

SEQ ID NO: 30029 - DNA, 15 bp, Homo sapiens
ggctggagtgcagtg

SEQ ID NO: 30030 - DNA, 15 bp, Homo sapiens
aggctggagtgcagt

SEQ ID NO: 30031 - DNA, 15 bp, Homo sapiens
caggctggagtgcag

SEQ ID NO: 30032 - DNA, 15 bp, Homo sapiens
ccaggctggagtgca

SEQ ID NO: 30033 - DNA, 15 bp, Homo sapiens
cccaggctggagtgc

SEQ ID NO: 30034 - DNA, 15 bp, Homo sapiens
gcctgggcaacagag

SEQ ID NO: 30035 - DNA, 15 bp, Homo sapiens
agcctgggcaacaga

SEQ ID NO: 30036 - DNA, 15 bp, Homo sapiens
cagcctgggcaacag

SEQ ID NO: 30037 - DNA, 15 bp, Homo sapiens
ccagcctgggcaaca

SEQ ID NO: 30038 - DNA, 15 bp, Homo sapiens
gcactccagcctggg

SEQ ID NO: 30039 - DNA, 15 bp, Homo sapiens
tgcactccagcctgg

SEQ ID NO: 30040 - DNA, 15 bp, Homo sapiens
gtaatcccagctact

SEQ ID NO: 30041 - DNA, 15 bp, Homo sapiens
tgtaatcccagctac

SEQ ID NO: 30042 - DNA, 15 bp, Homo sapiens
ctgtaatcccagcta

SEQ ID NO: 30043 - DNA, 15 bp, Homo sapiens
cctgtaatcccagct

SEQ ID NO: 30044 - DNA, 15 bp, Homo sapiens
atacaaaaattagcc

SEQ ID NO: 30045 - DNA, 15 bp, Homo sapiens
aatacaaaaattagc

SEQ ID NO: 30046 - DNA, 15 bp, Homo sapiens
aaatacaaaaattag

SEQ ID NO: 30047 - DNA, 15 bp, Homo sapiens
aaaatacaaaaatta

SEQ ID NO: 30048 - DNA, 15 bp, Homo sapiens
aaaaatacaaaaatt

SEQ ID NO: 30049 - DNA, 15 bp, Homo sapiens
ctaaaaatacaaaaa

SEQ ID NO: 30050 - DNA, 15 bp, Homo sapiens
actaaaaatacaaaa

SEQ ID NO: 30051 - DNA, 15 bp, Homo sapiens
tactaaaaatacaaa

SEQ ID NO: 30052 - DNA, 15 bp, Homo sapiens
ctactaaaaatacaa

SEQ ID NO: 30053 - DNA, 15 bp, Homo sapiens
tctactaaaaataca

SEQ ID NO: 30054 - DNA, 15 bp, Homo sapiens
ctctactaaaaatac

SEQ ID NO: 30055 - DNA, 15 bp, Homo sapiens
tctctactaaaaata

SEQ ID NO: 30056 - DNA, 15 bp, Homo sapiens
gtctctactaaaaat

SEQ ID NO: 30057 - DNA, 15 bp, Homo sapiens
gaggttgcagtgagc

SEQ ID NO: 30058 - DNA, 15 bp, Homo sapiens
aacatggtgaaaccc

SEQ ID NO: 30059 - DNA, 15 bp, Homo sapiens
caacatggtgaaacc

SEQ ID NO: 30060 - DNA, 15 bp, Homo sapiens
ccaacatggtgaaac

SEQ ID NO: 30061 - DNA, 15 bp, Homo sapiens
gccaacatggtgaaa

SEQ ID NO: 30062 - DNA, 15 bp, Homo sapiens
ggccaacatggtgaa

SEQ ID NO: 30063 - DNA, 15 bp, Homo sapiens
tggccaacatggtga

SEQ ID NO: 30064 - DNA, 15 bp, Homo sapiens
ctggccaacatggtg

SEQ ID NO: 30065 - DNA, 15 bp, Homo sapiens
cctggccaacatggt

SEQ ID NO: 30066 - DNA, 15 bp, Homo sapiens
gcctggccaacatgg

SEQ ID NO: 30067 - DNA, 15 bp, Homo sapiens
agcctggccaacatg

SEQ ID NO: 30068 - DNA, 15 bp, Homo sapiens
tgggaggccgaggca

SEQ ID NO: 30069 - DNA, 15 bp, Homo sapiens
ttgggaggccgaggc

SEQ ID NO: 30070 - DNA, 15 bp, Homo sapiens
tttgggaggccgagg

SEQ ID NO: 30071 - DNA, 15 bp, Homo sapiens
ctttgggaggccgag

SEQ ID NO: 30072 - DNA, 15 bp, Homo sapiens
actttgggaggccga

SEQ ID NO: 30073 - DNA, 15 bp, Homo sapiens
cactttgggaggccg

SEQ ID NO: 30074 - DNA, 15 bp, Homo sapiens
caggcgtgagccact

SEQ ID NO: 30075 - DNA, 15 bp, Homo sapiens
acaggcgtgagccac

SEQ ID NO: 30076 - DNA, 15 bp, Homo sapiens
tacaggcgtgagcca

SEQ ID NO: 30077 - DNA, 15 bp, Homo sapiens
ttacaggcgtgagcc

SEQ ID NO: 30078 - DNA, 15 bp, Homo sapiens
attacaggcgtgagc

SEQ ID NO: 30079 - DNA, 15 bp, Homo sapiens
gattacaggcgtgag

SEQ ID NO: 30080 - DNA, 15 bp, Homo sapiens
ggattacaggcgtga

SEQ ID NO: 30081 - DNA, 15 bp, Homo sapiens
caacctctgcctccc

SEQ ID NO: 30082 - DNA, 15 bp, Homo sapiens
gcaacctctgcctcc

SEQ ID NO: 30083 - DNA, 15 bp, Homo sapiens
tgcaacctctgcctc

SEQ ID NO: 30084 - DNA, 15 bp, Homo sapiens
ctgcaacctctgcct

SEQ ID NO: 30085 - DNA, 15 bp, Homo sapiens
actgcaacctctgcc

SEQ ID NO: 30086 - DNA, 15 bp, Homo sapiens
cactgcaacctctgc

SEQ ID NO: 30087 - DNA, 15 bp, Homo sapiens
tcactgcaacctctg

SEQ ID NO: 30088 - DNA, 15 bp, Homo sapiens
ctcactgcaacctct

SEQ ID NO: 30089 - DNA, 15 bp, Homo sapiens
ggctcactgcaacct

SEQ ID NO: 30090 - DNA, 15 bp, Homo sapiens
ggagtgcagtggcgc

SEQ ID NO: 30091 - DNA, 15 bp, Homo sapiens
tggagtgcagtggcg

SEQ ID NO: 30092 - DNA, 15 bp, Homo sapiens
gcccaggctggagtg

SEQ ID NO: 30093 - DNA, 15 bp, Homo sapiens
cctcttgagcacagt

SEQ ID NO: 30094 - DNA, 15 bp, Homo sapiens
acacacacagagaga

SEQ ID NO: 30095 - DNA, 15 bp, Homo sapiens
cacacacacagagag

SEQ ID NO: 30096 - DNA, 15 bp, Homo sapiens
acacacacacagaga

SEQ ID NO: 30097 - DNA, 15 bp, Homo sapiens
cacacacacacagag

SEQ ID NO: 30098 - DNA, 15 bp, Homo sapiens
acacacacacacaga

SEQ ID NO: 30099 - DNA, 15 bp, Homo sapiens
cacacacacacacag

SEQ ID NO: 30100 - DNA, 15 bp, Homo sapiens
ctgtgtgtgtgtgtg

SEQ ID NO: 30101 - DNA, 15 bp, Homo sapiens
tctgtgtgtgtgtgt

SEQ ID NO: 30102 - DNA, 15 bp, Homo sapiens
ctctgtgtgtgtgtg

SEQ ID NO: 30103 - DNA, 15 bp, Homo sapiens
tctctgtgtgtgtgt

SEQ ID NO: 30104 - DNA, 15 bp, Homo sapiens
ctctctgtgtgtgtg

SEQ ID NO: 30105 - DNA, 15 bp, Homo sapiens
tctctctgtgtgtgt

SEQ ID NO: 30106 - DNA, 15 bp, Homo sapiens
aaagatgtcatattt

SEQ ID NO: 30107 - DNA, 15 bp, Homo sapiens
aggaggtggaggttg

SEQ ID NO: 30108 - DNA, 15 bp, Homo sapiens
aaaccagattgttgg

SEQ ID NO: 30109 - DNA, 15 bp, Homo sapiens
aaccagattgttggc

SEQ ID NO: 30110 - DNA, 15 bp, Homo sapiens
accagattgttggca

SEQ ID NO: 30111 - DNA, 15 bp, Homo sapiens
ccagattgttggcag

SEQ ID NO: 30112 - DNA, 15 bp, Homo sapiens
cagattgttggcaga

SEQ ID NO: 30113 - DNA, 15 bp, Homo sapiens
agattgttggcagag

SEQ ID NO: 30114 - DNA, 15 bp, Homo sapiens
gattgttggcagagg

SEQ ID NO: 30115 - DNA, 15 bp, Homo sapiens
attgttggcagagga

SEQ ID NO: 30116 - DNA, 15 bp, Homo sapiens
ttgttggcagaggac

SEQ ID NO: 30117 - DNA, 15 bp, Homo sapiens
tgttggcagaggaca

SEQ ID NO: 30118 - DNA, 15 bp, Homo sapiens
gttggcagaggacac

SEQ ID NO: 30119 - DNA, 15 bp, Homo sapiens
ttggcagaggacaca

SEQ ID NO: 30120 - DNA, 15 bp, Homo sapiens
tggcagaggacacaa

SEQ ID NO: 30121 - DNA, 15 bp, Homo sapiens
ggcagaggacacaac

SEQ ID NO: 30122 - DNA, 15 bp, Homo sapiens
gcagaggacacaaca

SEQ ID NO: 30123 - DNA, 15 bp, Homo sapiens
cagaggacacaacaa

SEQ ID NO: 30124 - DNA, 15 bp, Homo sapiens
agaggacacaacaaa

SEQ ID NO: 30125 - DNA, 15 bp, Homo sapiens
gaggacacaacaaaa

SEQ ID NO: 30126 - DNA, 15 bp, Homo sapiens
aggacacaacaaaat

SEQ ID NO: 30127 - DNA, 15 bp, Homo sapiens
ggacacaacaaaatg

SEQ ID NO: 30128 - DNA, 15 bp, Homo sapiens
gacacaacaaaatgt

SEQ ID NO: 30129 - DNA, 15 bp, Homo sapiens
acacaacaaaatgta

SEQ ID NO: 30130 - DNA, 15 bp, Homo sapiens
cacaacaaaatgtaa

SEQ ID NO: 30131 - DNA, 15 bp, Homo sapiens
acaacaaaatgtaag

SEQ ID NO: 30132 - DNA, 15 bp, Homo sapiens
caacaaaatgtaagt

SEQ ID NO: 30133 - DNA, 15 bp, Homo sapiens
aacaaaatgtaagtt

SEQ ID NO: 30134 - DNA, 15 bp, Homo sapiens
acaaaatgtaagtta

SEQ ID NO: 30135 - DNA, 15 bp, Homo sapiens
caaaatgtaagttag

SEQ ID NO: 30136 - DNA, 15 bp, Homo sapiens
aaaatgtaagttaga

SEQ ID NO: 30137 - DNA, 15 bp, Homo sapiens
aaatgtaagttagaa

SEQ ID NO: 30138 - DNA, 15 bp, Homo sapiens
aatgtaagttagaaa

SEQ ID NO: 30139 - DNA, 15 bp, Homo sapiens
atgtaagttagaaaa

SEQ ID NO: 30140 - DNA, 15 bp, Homo sapiens
tgtaagttagaaaat

SEQ ID NO: 30141 - DNA, 15 bp, Homo sapiens
gtaagttagaaaatt

SEQ ID NO: 30142 - DNA, 15 bp, Homo sapiens
taagttagaaaattc

SEQ ID NO: 30143 - DNA, 15 bp, Homo sapiens
aagttagaaaattca

SEQ ID NO: 30144 - DNA, 15 bp, Homo sapiens
agttagaaaattcat

SEQ ID NO: 30145 - DNA, 15 bp, Homo sapiens
gttagaaaattcata

SEQ ID NO: 30146 - DNA, 15 bp, Homo sapiens
ttagaaaattcataa

SEQ ID NO: 30147 - DNA, 15 bp, Homo sapiens
tagaaaattcataaa

SEQ ID NO: 30148 - DNA, 15 bp, Homo sapiens
agaaaattcataaac

SEQ ID NO: 30149 - DNA, 15 bp, Homo sapiens
gaaaattcataaaca

SEQ ID NO: 30150 - DNA, 15 bp, Homo sapiens
aaaattcataaacat

SEQ ID NO: 30151 - DNA, 15 bp, Homo sapiens
aaattcataaacata

SEQ ID NO: 30152 - DNA, 15 bp, Homo sapiens
aattcataaacatac

SEQ ID NO: 30153 - DNA, 15 bp, Homo sapiens
attcataaacataca

SEQ ID NO: 30154 - DNA, 15 bp, Homo sapiens
ttcataaacatacat

SEQ ID NO: 30155 - DNA, 15 bp, Homo sapiens
tcataaacatacatt

SEQ ID NO: 30156 - DNA, 15 bp, Homo sapiens
cataaacatacattt

SEQ ID NO: 30157 - DNA, 15 bp, Homo sapiens
ataaacatacattta

SEQ ID NO: 30158 - DNA, 15 bp, Homo sapiens
taaacatacatttat

SEQ ID NO: 30159 - DNA, 15 bp, Homo sapiens
aaacatacatttatt

SEQ ID NO: 30160 - DNA, 15 bp, Homo sapiens
aacatacatttattc

SEQ ID NO: 30161 - DNA, 15 bp, Homo sapiens
acatacatttattca

SEQ ID NO: 30162 - DNA, 15 bp, Homo sapiens
catacatttattcag

SEQ ID NO: 30163 - DNA, 15 bp, Homo sapiens
atacatttattcagg

SEQ ID NO: 30164 - DNA, 15 bp, Homo sapiens
tacatttattcagga

SEQ ID NO: 30165 - DNA, 15 bp, Homo sapiens
acatttattcaggaa

SEQ ID NO: 30166 - DNA, 15 bp, Homo sapiens
catttattcaggaaa

SEQ ID NO: 30167 - DNA, 15 bp, Homo sapiens
atttattcaggaaat

SEQ ID NO: 30168 - DNA, 15 bp, Homo sapiens
tttattcaggaaata

SEQ ID NO: 30169 - DNA, 15 bp, Homo sapiens
ttattcaggaaatac

SEQ ID NO: 30170 - DNA, 15 bp, Homo sapiens
tattcaggaaataca

SEQ ID NO: 30171 - DNA, 15 bp, Homo sapiens
attcaggaaatacaa

SEQ ID NO: 30172 - DNA, 15 bp, Homo sapiens
ttcaggaaatacaat

SEQ ID NO: 30173 - DNA, 15 bp, Homo sapiens
tcaggaaatacaatt

SEQ ID NO: 30174 - DNA, 15 bp, Homo sapiens
caggaaatacaatta

SEQ ID NO: 30175 - DNA, 15 bp, Homo sapiens
aggaaatacaattac

SEQ ID NO: 30176 - DNA, 15 bp, Homo sapiens
ggaaatacaattact

SEQ ID NO: 30177 - DNA, 15 bp, Homo sapiens
gaaatacaattacta

SEQ ID NO: 30178 - DNA, 15 bp, Homo sapiens
aaatacaattactag

SEQ ID NO: 30179 - DNA, 15 bp, Homo sapiens
aatacaattactaga

SEQ ID NO: 30180 - DNA, 15 bp, Homo sapiens
atacaattactagaa

SEQ ID NO: 30181 - DNA, 15 bp, Homo sapiens
tacaattactagaat

SEQ ID NO: 30182 - DNA, 15 bp, Homo sapiens
acaattactagaatc

SEQ ID NO: 30183 - DNA, 15 bp, Homo sapiens
caattactagaatcc

SEQ ID NO: 30184 - DNA, 15 bp, Homo sapiens
aattactagaatcct

SEQ ID NO: 30185 - DNA, 15 bp, Homo sapiens
attactagaatcctt

SEQ ID NO: 30186 - DNA, 15 bp, Homo sapiens
ttactagaatccttg

SEQ ID NO: 30187 - DNA, 15 bp, Homo sapiens
tactagaatccttga

SEQ ID NO: 30188 - DNA, 15 bp, Homo sapiens
actagaatccttgat

SEQ ID NO: 30189 - DNA, 15 bp, Homo sapiens
ctagaatccttgata

SEQ ID NO: 30190 - DNA, 15 bp, Homo sapiens
tagaatccttgatat

SEQ ID NO: 30191 - DNA, 15 bp, Homo sapiens
agaatccttgatatt

SEQ ID NO: 30192 - DNA, 15 bp, Homo sapiens
gaatccttgatattt

SEQ ID NO: 30193 - DNA, 15 bp, Homo sapiens
aatccttgatatttc

SEQ ID NO: 30194 - DNA, 15 bp, Homo sapiens
atccttgatatttca

SEQ ID NO: 30195 - DNA, 15 bp, Homo sapiens
tccttgatatttcaa

SEQ ID NO: 30196 - DNA, 15 bp, Homo sapiens
ccttgatatttcaat

SEQ ID NO: 30197 - DNA, 15 bp, Homo sapiens
cttgatatttcaatg

SEQ ID NO: 30198 - DNA, 15 bp, Homo sapiens
ttgatatttcaatga

SEQ ID NO: 30199 - DNA, 15 bp, Homo sapiens
tgatatttcaatgat

SEQ ID NO: 30200 - DNA, 15 bp, Homo sapiens
gatatttcaatgatc

SEQ ID NO: 30201 - DNA, 15 bp, Homo sapiens
atatttcaatgatca

SEQ ID NO: 30202 - DNA, 15 bp, Homo sapiens
tatttcaatgatcat

SEQ ID NO: 30203 - DNA, 15 bp, Homo sapiens
atttcaatgatcatt

SEQ ID NO: 30204 - DNA, 15 bp, Homo sapiens
tttcaatgatcattc

SEQ ID NO: 30205 - DNA, 15 bp, Homo sapiens
ttcaatgatcattcc

SEQ ID NO: 30206 - DNA, 15 bp, Homo sapiens
tcaatgatcattcca

SEQ ID NO: 30207 - DNA, 15 bp, Homo sapiens
caatgatcattccac

SEQ ID NO: 30208 - DNA, 15 bp, Homo sapiens
aatgatcattccaca

SEQ ID NO: 30209 - DNA, 15 bp, Homo sapiens
atgatcattccacat

SEQ ID NO: 30210 - DNA, 15 bp, Homo sapiens
tgatcattccacatt

SEQ ID NO: 30211 - DNA, 15 bp, Homo sapiens
gatcattccacatta

SEQ ID NO: 30212 - DNA, 15 bp, Homo sapiens
atcattccacattat

SEQ ID NO: 30213 - DNA, 15 bp, Homo sapiens
tcattccacattata

SEQ ID NO: 30214 - DNA, 15 bp, Homo sapiens
cattccacattataa

SEQ ID NO: 30215 - DNA, 15 bp, Homo sapiens
attccacattataaa

SEQ ID NO: 30216 - DNA, 15 bp, Homo sapiens
ttccacattataaaa

SEQ ID NO: 30217 - DNA, 15 bp, Homo sapiens
tccacattataaaat

SEQ ID NO: 30218 - DNA, 15 bp, Homo sapiens
ccacattataaaata

SEQ ID NO: 30219 - DNA, 15 bp, Homo sapiens
cacattataaaatat

SEQ ID NO: 30220 - DNA, 15 bp, Homo sapiens
acattataaaatatt

SEQ ID NO: 30221 - DNA, 15 bp, Homo sapiens
cattataaaatattc

SEQ ID NO: 30222 - DNA, 15 bp, Homo sapiens
attataaaatattca

SEQ ID NO: 30223 - DNA, 15 bp, Homo sapiens
ttataaaatattcac

SEQ ID NO: 30224 - DNA, 15 bp, Homo sapiens
tataaaatattcaca

SEQ ID NO: 30225 - DNA, 15 bp, Homo sapiens
ataaaatattcacaa

SEQ ID NO: 30226 - DNA, 15 bp, Homo sapiens
taaaatattcacaaa

SEQ ID NO: 30227 - DNA, 15 bp, Homo sapiens
aaaatattcacaaac

SEQ ID NO: 30228 - DNA, 15 bp, Homo sapiens
aaatattcacaaaca

SEQ ID NO: 30229 - DNA, 15 bp, Homo sapiens
aatattcacaaacat

SEQ ID NO: 30230 - DNA, 15 bp, Homo sapiens
atattcacaaacatg

SEQ ID NO: 30231 - DNA, 15 bp, Homo sapiens
tattcacaaacatgt

SEQ ID NO: 30232 - DNA, 15 bp, Homo sapiens
attcacaaacatgta

SEQ ID NO: 30233 - DNA, 15 bp, Homo sapiens
ttcacaaacatgtag

SEQ ID NO: 30234 - DNA, 15 bp, Homo sapiens
tcacaaacatgtagt

SEQ ID NO: 30235 - DNA, 15 bp, Homo sapiens
cacaaacatgtagtt

SEQ ID NO: 30236 - DNA, 15 bp, Homo sapiens
acaaacatgtagttt

SEQ ID NO: 30237 - DNA, 15 bp, Homo sapiens
caaacatgtagtttt

SEQ ID NO: 30238 - DNA, 15 bp, Homo sapiens
aaacatgtagttttt

SEQ ID NO: 30239 - DNA, 15 bp, Homo sapiens
aacatgtagtttttt

SEQ ID NO: 30240 - DNA, 15 bp, Homo sapiens
acatgtagtttttta

SEQ ID NO: 30241 - DNA, 15 bp, Homo sapiens
catgtagttttttaa

SEQ ID NO: 30242 - DNA, 15 bp, Homo sapiens
atgtagttttttaag

SEQ ID NO: 30243 - DNA, 15 bp, Homo sapiens
tgtagttttttaagt

SEQ ID NO: 30244 - DNA, 15 bp, Homo sapiens
gtagttttttaagtc

SEQ ID NO: 30245 - DNA, 15 bp, Homo sapiens
tagttttttaagtct

SEQ ID NO: 30246 - DNA, 15 bp, Homo sapiens
agttttttaagtcta

SEQ ID NO: 30247 - DNA, 15 bp, Homo sapiens
gttttttaagtctac

SEQ ID NO: 30248 - DNA, 15 bp, Homo sapiens
ttttttaagtctaca

SEQ ID NO: 30249 - DNA, 15 bp, Homo sapiens
tttttaagtctacac

SEQ ID NO: 30250 - DNA, 15 bp, Homo sapiens
ttttaagtctacacc

SEQ ID NO: 30251 - DNA, 15 bp, Homo sapiens
tttaagtctacacca

SEQ ID NO: 30252 - DNA, 15 bp, Homo sapiens
ttaagtctacaccag

SEQ ID NO: 30253 - DNA, 15 bp, Homo sapiens
taagtctacaccagg

SEQ ID NO: 30254 - DNA, 15 bp, Homo sapiens
aagtctacaccaggt

SEQ ID NO: 30255 - DNA, 15 bp, Homo sapiens
agtctacaccaggtc

SEQ ID NO: 30256 - DNA, 15 bp, Homo sapiens
gtctacaccaggtca

SEQ ID NO: 30257 - DNA, 15 bp, Homo sapiens
tctacaccaggtcat

SEQ ID NO: 30258 - DNA, 15 bp, Homo sapiens
ctacaccaggtcatg

SEQ ID NO: 30259 - DNA, 15 bp, Homo sapiens
tacaccaggtcatgc

SEQ ID NO: 30260 - DNA, 15 bp, Homo sapiens
acaccaggtcatgct

SEQ ID NO: 30261 - DNA, 15 bp, Homo sapiens
caccaggtcatgctg

SEQ ID NO: 30262 - DNA, 15 bp, Homo sapiens
accaggtcatgctga

SEQ ID NO: 30263 - DNA, 15 bp, Homo sapiens
ccaggtcatgctgac

SEQ ID NO: 30264 - DNA, 15 bp, Homo sapiens
caggtcatgctgaca

SEQ ID NO: 30265 - DNA, 15 bp, Homo sapiens
aggtcatgctgacat

SEQ ID NO: 30266 - DNA, 15 bp, Homo sapiens
ggtcatgctgacatt

SEQ ID NO: 30267 - DNA, 15 bp, Homo sapiens
gtcatgctgacattc

SEQ ID NO: 30268 - DNA, 15 bp, Homo sapiens
tcatgctgacattct

SEQ ID NO: 30269 - DNA, 15 bp, Homo sapiens
catgctgacattctt

SEQ ID NO: 30270 - DNA, 15 bp, Homo sapiens
atgctgacattcttt

SEQ ID NO: 30271 - DNA, 15 bp, Homo sapiens
tgctgacattctttt

SEQ ID NO: 30272 - DNA, 15 bp, Homo sapiens
gctgacattcttttt

SEQ ID NO: 30273 - DNA, 15 bp, Homo sapiens
ctgacattctttttg

SEQ ID NO: 30274 - DNA, 15 bp, Homo sapiens
tgacattctttttgg

SEQ ID NO: 30275 - DNA, 15 bp, Homo sapiens
gacattctttttgga

SEQ ID NO: 30276 - DNA, 15 bp, Homo sapiens
acattctttttggat

SEQ ID NO: 30277 - DNA, 15 bp, Homo sapiens
cattctttttggata

SEQ ID NO: 30278 - DNA, 15 bp, Homo sapiens
attctttttggataa

SEQ ID NO: 30279 - DNA, 15 bp, Homo sapiens
ttctttttggataag

SEQ ID NO: 30280 - DNA, 15 bp, Homo sapiens
tctttttggataagc

SEQ ID NO: 30281 - DNA, 15 bp, Homo sapiens
ctttttggataagcc

SEQ ID NO: 30282 - DNA, 15 bp, Homo sapiens
tttttggataagcca

SEQ ID NO: 30283 - DNA, 15 bp, Homo sapiens
ttttggataagccat

SEQ ID NO: 30284 - DNA, 15 bp, Homo sapiens
tttggataagccata

SEQ ID NO: 30285 - DNA, 15 bp, Homo sapiens
ttggataagccataa

SEQ ID NO: 30286 - DNA, 15 bp, Homo sapiens
tggataagccataac

SEQ ID NO: 30287 - DNA, 15 bp, Homo sapiens
ggataagccataacc

SEQ ID NO: 30288 - DNA, 15 bp, Homo sapiens
gataagccataacca

SEQ ID NO: 30289 - DNA, 15 bp, Homo sapiens
ataagccataaccat

SEQ ID NO: 30290 - DNA, 15 bp, Homo sapiens
taagccataaccatt

SEQ ID NO: 30291 - DNA, 15 bp, Homo sapiens
aagccataaccattt

SEQ ID NO: 30292 - DNA, 15 bp, Homo sapiens
agccataaccatttc

SEQ ID NO: 30293 - DNA, 15 bp, Homo sapiens
gccataaccatttct

SEQ ID NO: 30294 - DNA, 15 bp, Homo sapiens
ccataaccatttctt

SEQ ID NO: 30295 - DNA, 15 bp, Homo sapiens
cataaccatttcttc

SEQ ID NO: 30296 - DNA, 15 bp, Homo sapiens
ataaccatttcttct

SEQ ID NO: 30297 - DNA, 15 bp, Homo sapiens
taaccatttcttcta

SEQ ID NO: 30298 - DNA, 15 bp, Homo sapiens
aaccatttcttctat

SEQ ID NO: 30299 - DNA, 15 bp, Homo sapiens
accatttcttctatt

SEQ ID NO: 30300 - DNA, 15 bp, Homo sapiens
ccatttcttctatta

SEQ ID NO: 30301 - DNA, 15 bp, Homo sapiens
catttcttctattaa

SEQ ID NO: 30302 - DNA, 15 bp, Homo sapiens
atttcttctattaaa

SEQ ID NO: 30303 - DNA, 15 bp, Homo sapiens
tttcttctattaaat

SEQ ID NO: 30304 - DNA, 15 bp, Homo sapiens
ttcttctattaaatg

SEQ ID NO: 30305 - DNA, 15 bp, Homo sapiens
tcttctattaaatgc

SEQ ID NO: 30306 - DNA, 15 bp, Homo sapiens
cttctattaaatgct

SEQ ID NO: 30307 - DNA, 15 bp, Homo sapiens
ttctattaaatgcta

SEQ ID NO: 30308 - DNA, 15 bp, Homo sapiens
tctattaaatgctat

SEQ ID NO: 30309 - DNA, 15 bp, Homo sapiens
ctattaaatgctata

SEQ ID NO: 30310 - DNA, 15 bp, Homo sapiens
tattaaatgctataa

SEQ ID NO: 30311 - DNA, 15 bp, Homo sapiens
attaaatgctataat

SEQ ID NO: 30312 - DNA, 15 bp, Homo sapiens
ttaaatgctataata

SEQ ID NO: 30313 - DNA, 15 bp, Homo sapiens
taaatgctataatat

SEQ ID NO: 30314 - DNA, 15 bp, Homo sapiens
aaatgctataatatc

SEQ ID NO: 30315 - DNA, 15 bp, Homo sapiens
aatgctataatatcc

SEQ ID NO: 30316 - DNA, 15 bp, Homo sapiens
atgctataatatcca

SEQ ID NO: 30317 - DNA, 15 bp, Homo sapiens
tgctataatatccat

SEQ ID NO: 30318 - DNA, 15 bp, Homo sapiens
gctataatatccatt

SEQ ID NO: 30319 - DNA, 15 bp, Homo sapiens
ctataatatccattt

SEQ ID NO: 30320 - DNA, 15 bp, Homo sapiens
tataatatccatttt

SEQ ID NO: 30321 - DNA, 15 bp, Homo sapiens
ataatatccatttta

SEQ ID NO: 30322 - DNA, 15 bp, Homo sapiens
taatatccattttaa

SEQ ID NO: 30323 - DNA, 15 bp, Homo sapiens
aatatccattttaat

SEQ ID NO: 30324 - DNA, 15 bp, Homo sapiens
atatccattttaatt

SEQ ID NO: 30325 - DNA, 15 bp, Homo sapiens
tatccattttaattg

SEQ ID NO: 30326 - DNA, 15 bp, Homo sapiens
atccattttaattgt

SEQ ID NO: 30327 - DNA, 15 bp, Homo sapiens
tccattttaattgta

SEQ ID NO: 30328 - DNA, 15 bp, Homo sapiens
ccattttaattgtaa

SEQ ID NO: 30329 - DNA, 15 bp, Homo sapiens
cattttaattgtaaa

SEQ ID NO: 30330 - DNA, 15 bp, Homo sapiens
attttaattgtaaac

SEQ ID NO: 30331 - DNA, 15 bp, Homo sapiens
ttttaattgtaaaca

SEQ ID NO: 30332 - DNA, 15 bp, Homo sapiens
tttaattgtaaacaa

SEQ ID NO: 30333 - DNA, 15 bp, Homo sapiens
ttaattgtaaacaaa

SEQ ID NO: 30334 - DNA, 15 bp, Homo sapiens
taattgtaaacaaag

SEQ ID NO: 30335 - DNA, 15 bp, Homo sapiens
aattgtaaacaaagt

SEQ ID NO: 30336 - DNA, 15 bp, Homo sapiens
attgtaaacaaagta

SEQ ID NO: 30337 - DNA, 15 bp, Homo sapiens
ttgtaaacaaagtac

SEQ ID NO: 30338 - DNA, 15 bp, Homo sapiens
tgtaaacaaagtact

SEQ ID NO: 30339 - DNA, 15 bp, Homo sapiens
gtaaacaaagtactt

SEQ ID NO: 30340 - DNA, 15 bp, Homo sapiens
taaacaaagtacttg

SEQ ID NO: 30341 - DNA, 15 bp, Homo sapiens
aaacaaagtacttga

SEQ ID NO: 30342 - DNA, 15 bp, Homo sapiens
aacaaagtacttgag

SEQ ID NO: 30343 - DNA, 15 bp, Homo sapiens
acaaagtacttgagc

SEQ ID NO: 30344 - DNA, 15 bp, Homo sapiens
caaagtacttgagcc

SEQ ID NO: 30345 - DNA, 15 bp, Homo sapiens
aaagtacttgagcca

SEQ ID NO: 30346 - DNA, 15 bp, Homo sapiens
aagtacttgagccag

SEQ ID NO: 30347 - DNA, 15 bp, Homo sapiens
agtacttgagccaga

SEQ ID NO: 30348 - DNA, 15 bp, Homo sapiens
gtacttgagccagac

SEQ ID NO: 30349 - DNA, 15 bp, Homo sapiens
tacttgagccagact

SEQ ID NO: 30350 - DNA, 15 bp, Homo sapiens
acttgagccagacta

SEQ ID NO: 30351 - DNA, 15 bp, Homo sapiens
cttgagccagactac

SEQ ID NO: 30352 - DNA, 15 bp, Homo sapiens
ttgagccagactact

SEQ ID NO: 30353 - DNA, 15 bp, Homo sapiens
tgagccagactactt

SEQ ID NO: 30354 - DNA, 15 bp, Homo sapiens
gagccagactactta

SEQ ID NO: 30355 - DNA, 15 bp, Homo sapiens
agccagactacttaa

SEQ ID NO: 30356 - DNA, 15 bp, Homo sapiens
gccagactacttaag

SEQ ID NO: 30357 - DNA, 15 bp, Homo sapiens
ccagactacttaagt

SEQ ID NO: 30358 - DNA, 15 bp, Homo sapiens
cagactacttaagta

SEQ ID NO: 30359 - DNA, 15 bp, Homo sapiens
agactacttaagtac

SEQ ID NO: 30360 - DNA, 15 bp, Homo sapiens
gactacttaagtact

SEQ ID NO: 30361 - DNA, 15 bp, Homo sapiens
actacttaagtactt

SEQ ID NO: 30362 - DNA, 15 bp, Homo sapiens
ctacttaagtacttg

SEQ ID NO: 30363 - DNA, 15 bp, Homo sapiens
tacttaagtacttga

SEQ ID NO: 30364 - DNA, 15 bp, Homo sapiens
acttaagtacttgag

SEQ ID NO: 30365 - DNA, 15 bp, Homo sapiens
cttaagtacttgagc

SEQ ID NO: 30366 - DNA, 15 bp, Homo sapiens
ttaagtacttgagca

SEQ ID NO: 30367 - DNA, 15 bp, Homo sapiens
taagtacttgagcaa

SEQ ID NO: 30368 - DNA, 15 bp, Homo sapiens
aagtacttgagcaaa

SEQ ID NO: 30369 - DNA, 15 bp, Homo sapiens
agtacttgagcaaaa

SEQ ID NO: 30370 - DNA, 15 bp, Homo sapiens
gtacttgagcaaaat

SEQ ID NO: 30371 - DNA, 15 bp, Homo sapiens
tacttgagcaaaata

SEQ ID NO: 30372 - DNA, 15 bp, Homo sapiens
acttgagcaaaataa

SEQ ID NO: 30373 - DNA, 15 bp, Homo sapiens
cttgagcaaaataac

SEQ ID NO: 30374 - DNA, 15 bp, Homo sapiens
ttgagcaaaataact

SEQ ID NO: 30375 - DNA, 15 bp, Homo sapiens
tgagcaaaataactt

SEQ ID NO: 30376 - DNA, 15 bp, Homo sapiens
gagcaaaataactta

SEQ ID NO: 30377 - DNA, 15 bp, Homo sapiens
agcaaaataacttaa

SEQ ID NO: 30378 - DNA, 15 bp, Homo sapiens
gcaaaataacttaaa

SEQ ID NO: 30379 - DNA, 15 bp, Homo sapiens
caaaataacttaaaa

SEQ ID NO: 30380 - DNA, 15 bp, Homo sapiens
aaaataacttaaaaa

SEQ ID NO: 30381 - DNA, 15 bp, Homo sapiens
aaataacttaaaaaa

SEQ ID NO: 30382 - DNA, 15 bp, Homo sapiens
aataacttaaaaaaa

SEQ ID NO: 30383 - DNA, 15 bp, Homo sapiens
ataacttaaaaaaat

SEQ ID NO: 30384 - DNA, 15 bp, Homo sapiens
taacttaaaaaaatc

SEQ ID NO: 30385 - DNA, 15 bp, Homo sapiens
aacttaaaaaaatct

SEQ ID NO: 30386 - DNA, 15 bp, Homo sapiens
acttaaaaaaatctt

SEQ ID NO: 30387 - DNA, 15 bp, Homo sapiens
cttaaaaaaatctta

SEQ ID NO: 30388 - DNA, 15 bp, Homo sapiens
ttaaaaaaatcttaa

SEQ ID NO: 30389 - DNA, 15 bp, Homo sapiens
taaaaaaatcttaag

SEQ ID NO: 30390 - DNA, 15 bp, Homo sapiens
aaaaaaatcttaaga

SEQ ID NO: 30391 - DNA, 15 bp, Homo sapiens
aaaaaatcttaagag

SEQ ID NO: 30392 - DNA, 15 bp, Homo sapiens
aaaaatcttaagagg

SEQ ID NO: 30393 - DNA, 15 bp, Homo sapiens
aaaatcttaagagga

SEQ ID NO: 30394 - DNA, 15 bp, Homo sapiens
aaatcttaagaggag

SEQ ID NO: 30395 - DNA, 15 bp, Homo sapiens
aatcttaagaggagg

SEQ ID NO: 30396 - DNA, 15 bp, Homo sapiens
atcttaagaggagga

SEQ ID NO: 30397 - DNA, 15 bp, Homo sapiens
tcttaagaggaggag

SEQ ID NO: 30398 - DNA, 15 bp, Homo sapiens
cttaagaggaggagg

SEQ ID NO: 30399 - DNA, 15 bp, Homo sapiens
ttaagaggaggagga

SEQ ID NO: 30400 - DNA, 15 bp, Homo sapiens
taagaggaggaggac

SEQ ID NO: 30401 - DNA, 15 bp, Homo sapiens
aagaggaggaggaca

SEQ ID NO: 30402 - DNA, 15 bp, Homo sapiens
agaggaggaggacaa

SEQ ID NO: 30403 - DNA, 15 bp, Homo sapiens
gaggaggaggacaat

SEQ ID NO: 30404 - DNA, 15 bp, Homo sapiens
aggaggaggacaatg

SEQ ID NO: 30405 - DNA, 15 bp, Homo sapiens
ggaggaggacaatga

SEQ ID NO: 30406 - DNA, 15 bp, Homo sapiens
gaggaggacaatgat

SEQ ID NO: 30407 - DNA, 15 bp, Homo sapiens
aggaggacaatgata

SEQ ID NO: 30408 - DNA, 15 bp, Homo sapiens
ggaggacaatgatat

SEQ ID NO: 30409 - DNA, 15 bp, Homo sapiens
gaggacaatgatatt

SEQ ID NO: 30410 - DNA, 15 bp, Homo sapiens
aggacaatgatattt

SEQ ID NO: 30411 - DNA, 15 bp, Homo sapiens
ggacaatgatatttt

SEQ ID NO: 30412 - DNA, 15 bp, Homo sapiens
gacaatgatattttt

SEQ ID NO: 30413 - DNA, 15 bp, Homo sapiens
acaatgatatttttt

SEQ ID NO: 30414 - DNA, 15 bp, Homo sapiens
caatgatatttttta

SEQ ID NO: 30415 - DNA, 15 bp, Homo sapiens
aatgatattttttaa

SEQ ID NO: 30416 - DNA, 15 bp, Homo sapiens
atgatattttttaaa

SEQ ID NO: 30417 - DNA, 15 bp, Homo sapiens
tgatattttttaaaa

SEQ ID NO: 30418 - DNA, 15 bp, Homo sapiens
gatattttttaaaaa

SEQ ID NO: 30419 - DNA, 15 bp, Homo sapiens
atattttttaaaaac

SEQ ID NO: 30420 - DNA, 15 bp, Homo sapiens
tattttttaaaaaca

SEQ ID NO: 30421 - DNA, 15 bp, Homo sapiens
attttttaaaaacat

SEQ ID NO: 30422 - DNA, 15 bp, Homo sapiens
ttttttaaaaacata

SEQ ID NO: 30423 - DNA, 15 bp, Homo sapiens
tttttaaaaacatat

SEQ ID NO: 30424 - DNA, 15 bp, Homo sapiens
ttttaaaaacatatt

SEQ ID NO: 30425 - DNA, 15 bp, Homo sapiens
tttaaaaacatattt

SEQ ID NO: 30426 - DNA, 15 bp, Homo sapiens
ttaaaaacatatttg

SEQ ID NO: 30427 - DNA, 15 bp, Homo sapiens
taaaaacatatttga

SEQ ID NO: 30428 - DNA, 15 bp, Homo sapiens
aaaaacatatttgag

SEQ ID NO: 30429 - DNA, 15 bp, Homo sapiens
aaaacatatttgagg

SEQ ID NO: 30430 - DNA, 15 bp, Homo sapiens
aaacatatttgaggc

SEQ ID NO: 30431 - DNA, 15 bp, Homo sapiens
aacatatttgaggct

SEQ ID NO: 30432 - DNA, 15 bp, Homo sapiens
acatatttgaggctg

SEQ ID NO: 30433 - DNA, 15 bp, Homo sapiens
catatttgaggctgg

SEQ ID NO: 30434 - DNA, 15 bp, Homo sapiens
atatttgaggctggg

SEQ ID NO: 30435 - DNA, 15 bp, Homo sapiens
tatttgaggctgggc

SEQ ID NO: 30436 - DNA, 15 bp, Homo sapiens
atttgaggctgggca

SEQ ID NO: 30437 - DNA, 15 bp, Homo sapiens
tttgaggctgggcat

SEQ ID NO: 30438 - DNA, 15 bp, Homo sapiens
ttgaggctgggcatg

SEQ ID NO: 30439 - DNA, 15 bp, Homo sapiens
tgaggctgggcatgg

SEQ ID NO: 30440 - DNA, 15 bp, Homo sapiens
gaggctgggcatggt

SEQ ID NO: 30441 - DNA, 15 bp, Homo sapiens
aggctgggcatggtg

SEQ ID NO: 30442 - DNA, 15 bp, Homo sapiens
ggctgggcatggtgg

SEQ ID NO: 30443 - DNA, 15 bp, Homo sapiens
gctgggcatggtggc

SEQ ID NO: 30444 - DNA, 15 bp, Homo sapiens
ctgggcatggtggct

SEQ ID NO: 30445 - DNA, 15 bp, Homo sapiens
tgggcatggtggctc

SEQ ID NO: 30446 - DNA, 15 bp, Homo sapiens
gggcatggtggctca

SEQ ID NO: 30447 - DNA, 15 bp, Homo sapiens
ggcatggtggctcac

SEQ ID NO: 30448 - DNA, 15 bp, Homo sapiens
gcatggtggctcacg

SEQ ID NO: 30449 - DNA, 15 bp, Homo sapiens
catggtggctcacgc

SEQ ID NO: 30450 - DNA, 15 bp, Homo sapiens
atggtggctcacgcc

SEQ ID NO: 30451 - DNA, 15 bp, Homo sapiens
tggtggctcacgcca

SEQ ID NO: 30452 - DNA, 15 bp, Homo sapiens
ggtggctcacgccag

SEQ ID NO: 30453 - DNA, 15 bp, Homo sapiens
gtggctcacgccagt

SEQ ID NO: 30454 - DNA, 15 bp, Homo sapiens
tggctcacgccagta

SEQ ID NO: 30455 - DNA, 15 bp, Homo sapiens
ggctcacgccagtaa

SEQ ID NO: 30456 - DNA, 15 bp, Homo sapiens
gctcacgccagtaat

SEQ ID NO: 30457 - DNA, 15 bp, Homo sapiens
ctcacgccagtaatt

SEQ ID NO: 30458 - DNA, 15 bp, Homo sapiens
tcacgccagtaattc

SEQ ID NO: 30459 - DNA, 15 bp, Homo sapiens
cacgccagtaattcc

SEQ ID NO: 30460 - DNA, 15 bp, Homo sapiens
acgccagtaattcca

SEQ ID NO: 30461 - DNA, 15 bp, Homo sapiens
cgccagtaattccag

SEQ ID NO: 30462 - DNA, 15 bp, Homo sapiens
gccagtaattccagc

SEQ ID NO: 30463 - DNA, 15 bp, Homo sapiens
ccagtaattccagca

SEQ ID NO: 30464 - DNA, 15 bp, Homo sapiens
cagtaattccagcac

SEQ ID NO: 30465 - DNA, 15 bp, Homo sapiens
agtaattccagcact

SEQ ID NO: 30466 - DNA, 15 bp, Homo sapiens
gtaattccagcactt

SEQ ID NO: 30467 - DNA, 15 bp, Homo sapiens
taattccagcacttt

SEQ ID NO: 30468 - DNA, 15 bp, Homo sapiens
aattccagcactttg

SEQ ID NO: 30469 - DNA, 15 bp, Homo sapiens
attccagcactttgg

SEQ ID NO: 30470 - DNA, 15 bp, Homo sapiens
ttccagcactttggg

SEQ ID NO: 30471 - DNA, 15 bp, Homo sapiens
tccagcactttggga

SEQ ID NO: 30472 - DNA, 15 bp, Homo sapiens
ccagcactttgggag

SEQ ID NO: 30473 - DNA, 15 bp, Homo sapiens
cagcactttgggagg

SEQ ID NO: 30474 - DNA, 15 bp, Homo sapiens
agcactttgggaggc

SEQ ID NO: 30475 - DNA, 15 bp, Homo sapiens
gcactttgggaggcc

SEQ ID NO: 30476 - DNA, 15 bp, Homo sapiens
tgggaggccgaggcg

SEQ ID NO: 30477 - DNA, 15 bp, Homo sapiens
gggaggccgaggcgg

SEQ ID NO: 30478 - DNA, 15 bp, Homo sapiens
ggaggccgaggcggg

SEQ ID NO: 30479 - DNA, 15 bp, Homo sapiens
gaggccgaggcgggc

SEQ ID NO: 30480 - DNA, 15 bp, Homo sapiens
aggccgaggcgggcg

SEQ ID NO: 30481 - DNA, 15 bp, Homo sapiens
ggccgaggcgggcga

SEQ ID NO: 30482 - DNA, 15 bp, Homo sapiens
gccgaggcgggcgaa

SEQ ID NO: 30483 - DNA, 15 bp, Homo sapiens
ccgaggcgggcgaat

SEQ ID NO: 30484 - DNA, 15 bp, Homo sapiens
cgaggcgggcgaatc

SEQ ID NO: 30485 - DNA, 15 bp, Homo sapiens
gaggcgggcgaatca

SEQ ID NO: 30486 - DNA, 15 bp, Homo sapiens
aggcgggcgaatcac

SEQ ID NO: 30487 - DNA, 15 bp, Homo sapiens
ggcgggcgaatcacg

SEQ ID NO: 30488 - DNA, 15 bp, Homo sapiens
gcgggcgaatcacga

SEQ ID NO: 30489 - DNA, 15 bp, Homo sapiens
cgggcgaatcacgag

SEQ ID NO: 30490 - DNA, 15 bp, Homo sapiens
gggcgaatcacgagg

SEQ ID NO: 30491 - DNA, 15 bp, Homo sapiens
ggcgaatcacgaggt

SEQ ID NO: 30492 - DNA, 15 bp, Homo sapiens
gcgaatcacgaggtc

SEQ ID NO: 30493 - DNA, 15 bp, Homo sapiens
cgaatcacgaggtca

SEQ ID NO: 30494 - DNA, 15 bp, Homo sapiens
gaatcacgaggtcag

SEQ ID NO: 30495 - DNA, 15 bp, Homo sapiens
aatcacgaggtcagg

SEQ ID NO: 30496 - DNA, 15 bp, Homo sapiens
atcacgaggtcagga

SEQ ID NO: 30497 - DNA, 15 bp, Homo sapiens
tcacgaggtcaggag

SEQ ID NO: 30498 - DNA, 15 bp, Homo sapiens
cacgaggtcaggaga

SEQ ID NO: 30499 - DNA, 15 bp, Homo sapiens
acgaggtcaggagat

SEQ ID NO: 30500 - DNA, 15 bp, Homo sapiens
cgaggtcaggagatc

SEQ ID NO: 30501 - DNA, 15 bp, Homo sapiens
gaggtcaggagatcg

SEQ ID NO: 30502 - DNA, 15 bp, Homo sapiens
aggtcaggagatcga

SEQ ID NO: 30503 - DNA, 15 bp, Homo sapiens
ggtcaggagatcgag

SEQ ID NO: 30504 - DNA, 15 bp, Homo sapiens
gtcaggagatcgaga

SEQ ID NO: 30505 - DNA, 15 bp, Homo sapiens
tcaggagatcgagat

SEQ ID NO: 30506 - DNA, 15 bp, Homo sapiens
caggagatcgagatc

SEQ ID NO: 30507 - DNA, 15 bp, Homo sapiens
aggagatcgagatca

SEQ ID NO: 30508 - DNA, 15 bp, Homo sapiens
ggagatcgagatcat

SEQ ID NO: 30509 - DNA, 15 bp, Homo sapiens
gagatcgagatcatc

SEQ ID NO: 30510 - DNA, 15 bp, Homo sapiens
agatcgagatcatcc

SEQ ID NO: 30511 - DNA, 15 bp, Homo sapiens
gatcgagatcatcct

SEQ ID NO: 30512 - DNA, 15 bp, Homo sapiens
atcgagatcatcctg

SEQ ID NO: 30513 - DNA, 15 bp, Homo sapiens
tcgagatcatcctgg

SEQ ID NO: 30514 - DNA, 15 bp, Homo sapiens
cgagatcatcctggc

SEQ ID NO: 30515 - DNA, 15 bp, Homo sapiens
gagatcatcctggct

SEQ ID NO: 30516 - DNA, 15 bp, Homo sapiens
agatcatcctggcta

SEQ ID NO: 30517 - DNA, 15 bp, Homo sapiens
gatcatcctggctaa

SEQ ID NO: 30518 - DNA, 15 bp, Homo sapiens
atcatcctggctaac

SEQ ID NO: 30519 - DNA, 15 bp, Homo sapiens
tcatcctggctaaca

SEQ ID NO: 30520 - DNA, 15 bp, Homo sapiens
catcctggctaacac

SEQ ID NO: 30521 - DNA, 15 bp, Homo sapiens
atcctggctaacacg

SEQ ID NO: 30522 - DNA, 15 bp, Homo sapiens
tcctggctaacacgg

SEQ ID NO: 30523 - DNA, 15 bp, Homo sapiens
cctggctaacacggt

SEQ ID NO: 30524 - DNA, 15 bp, Homo sapiens
ctggctaacacggtg

SEQ ID NO: 30525 - DNA, 15 bp, Homo sapiens
tggctaacacggtga

SEQ ID NO: 30526 - DNA, 15 bp, Homo sapiens
ggctaacacggtgaa

SEQ ID NO: 30527 - DNA, 15 bp, Homo sapiens
gctaacacggtgaaa

SEQ ID NO: 30528 - DNA, 15 bp, Homo sapiens
ctaacacggtgaaac

SEQ ID NO: 30529 - DNA, 15 bp, Homo sapiens
taacacggtgaaacc

SEQ ID NO: 30530 - DNA, 15 bp, Homo sapiens
aacacggtgaaaccc

SEQ ID NO: 30531 - DNA, 15 bp, Homo sapiens
acacggtgaaacccc

SEQ ID NO: 30532 - DNA, 15 bp, Homo sapiens
cacggtgaaaccccg

SEQ ID NO: 30533 - DNA, 15 bp, Homo sapiens
acggtgaaaccccgt

SEQ ID NO: 30534 - DNA, 15 bp, Homo sapiens
cggtgaaaccccgtc

SEQ ID NO: 30535 - DNA, 15 bp, Homo sapiens
ggtgaaaccccgtct

SEQ ID NO: 30536 - DNA, 15 bp, Homo sapiens
gtgaaaccccgtctc

SEQ ID NO: 30537 - DNA, 15 bp, Homo sapiens
tgaaaccccgtctct

SEQ ID NO: 30538 - DNA, 15 bp, Homo sapiens
gaaaccccgtctcta

SEQ ID NO: 30539 - DNA, 15 bp, Homo sapiens
aaaccccgtctctac

SEQ ID NO: 30540 - DNA, 15 bp, Homo sapiens
aaccccgtctctact

SEQ ID NO: 30541 - DNA, 15 bp, Homo sapiens
accccgtctctacta

SEQ ID NO: 30542 - DNA, 15 bp, Homo sapiens
ccccgtctctactaa

SEQ ID NO: 30543 - DNA, 15 bp, Homo sapiens
cccgtctctactaaa

SEQ ID NO: 30544 - DNA, 15 bp, Homo sapiens
ccgtctctactaaaa

SEQ ID NO: 30545 - DNA, 15 bp, Homo sapiens
cgtctctactaaaaa

SEQ ID NO: 30546 - DNA, 15 bp, Homo sapiens
taaaaatacaaaaaa

SEQ ID NO: 30547 - DNA, 15 bp, Homo sapiens
aaaaatacaaaaaaa

SEQ ID NO: 30548 - DNA, 15 bp, Homo sapiens
aaaatacaaaaaaat

SEQ ID NO: 30549 - DNA, 15 bp, Homo sapiens
aaatacaaaaaaatt

SEQ ID NO: 30550 - DNA, 15 bp, Homo sapiens
aatacaaaaaaatta

SEQ ID NO: 30551 - DNA, 15 bp, Homo sapiens
atacaaaaaaattag

SEQ ID NO: 30552 - DNA, 15 bp, Homo sapiens
tacaaaaaaattagc

SEQ ID NO: 30553 - DNA, 15 bp, Homo sapiens
acaaaaaaattagcc

SEQ ID NO: 30554 - DNA, 15 bp, Homo sapiens
caaaaaaattagccg

SEQ ID NO: 30555 - DNA, 15 bp, Homo sapiens
aaaaaaattagccgg

SEQ ID NO: 30556 - DNA, 15 bp, Homo sapiens
aaaaaattagccggg

SEQ ID NO: 30557 - DNA, 15 bp, Homo sapiens
aaaaattagccggga

SEQ ID NO: 30558 - DNA, 15 bp, Homo sapiens
aaaattagccgggag

SEQ ID NO: 30559 - DNA, 15 bp, Homo sapiens
aaattagccgggaga

SEQ ID NO: 30560 - DNA, 15 bp, Homo sapiens
aattagccgggagag

SEQ ID NO: 30561 - DNA, 15 bp, Homo sapiens
attagccgggagagg

SEQ ID NO: 30562 - DNA, 15 bp, Homo sapiens
ttagccgggagaggt

SEQ ID NO: 30563 - DNA, 15 bp, Homo sapiens
tagccgggagaggtg

SEQ ID NO: 30564 - DNA, 15 bp, Homo sapiens
agccgggagaggtgg

SEQ ID NO: 30565 - DNA, 15 bp, Homo sapiens
gccgggagaggtggc

SEQ ID NO: 30566 - DNA, 15 bp, Homo sapiens
ccgggagaggtggca

SEQ ID NO: 30567 - DNA, 15 bp, Homo sapiens
cgggagaggtggcac

SEQ ID NO: 30568 - DNA, 15 bp, Homo sapiens
gggagaggtggcaca

SEQ ID NO: 30569 - DNA, 15 bp, Homo sapiens
ggagaggtggcacac

SEQ ID NO: 30570 - DNA, 15 bp, Homo sapiens
gagaggtggcacacg

SEQ ID NO: 30571 - DNA, 15 bp, Homo sapiens
agaggtggcacacgc

SEQ ID NO: 30572 - DNA, 15 bp, Homo sapiens
gaggtggcacacgcc

SEQ ID NO: 30573 - DNA, 15 bp, Homo sapiens
aggtggcacacgcct

SEQ ID NO: 30574 - DNA, 15 bp, Homo sapiens
ggtggcacacgcctg

SEQ ID NO: 30575 - DNA, 15 bp, Homo sapiens
gtggcacacgcctgt

SEQ ID NO: 30576 - DNA, 15 bp, Homo sapiens
tggcacacgcctgta

SEQ ID NO: 30577 - DNA, 15 bp, Homo sapiens
ggcacacgcctgtag

SEQ ID NO: 30578 - DNA, 15 bp, Homo sapiens
gcacacgcctgtagt

SEQ ID NO: 30579 - DNA, 15 bp, Homo sapiens
cacacgcctgtagtc

SEQ ID NO: 30580 - DNA, 15 bp, Homo sapiens
acacgcctgtagtcc

SEQ ID NO: 30581 - DNA, 15 bp, Homo sapiens
cacgcctgtagtcct

SEQ ID NO: 30582 - DNA, 15 bp, Homo sapiens
acgcctgtagtccta

SEQ ID NO: 30583 - DNA, 15 bp, Homo sapiens
cgcctgtagtcctag

SEQ ID NO: 30584 - DNA, 15 bp, Homo sapiens
gcctgtagtcctagc

SEQ ID NO: 30585 - DNA, 15 bp, Homo sapiens
cctgtagtcctagct

SEQ ID NO: 30586 - DNA, 15 bp, Homo sapiens
ctgtagtcctagcta

SEQ ID NO: 30587 - DNA, 15 bp, Homo sapiens
tgtagtcctagctac

SEQ ID NO: 30588 - DNA, 15 bp, Homo sapiens
gtagtcctagctact

SEQ ID NO: 30589 - DNA, 15 bp, Homo sapiens
tagtcctagctactc

SEQ ID NO: 30590 - DNA, 15 bp, Homo sapiens
agtcctagctactcg

SEQ ID NO: 30591 - DNA, 15 bp, Homo sapiens
gtcctagctactcgg

SEQ ID NO: 30592 - DNA, 15 bp, Homo sapiens
tcctagctactcggg

SEQ ID NO: 30593 - DNA, 15 bp, Homo sapiens
cctagctactcggga

SEQ ID NO: 30594 - DNA, 15 bp, Homo sapiens
ctagctactcgggag

SEQ ID NO: 30595 - DNA, 15 bp, Homo sapiens
tagctactcgggagg

SEQ ID NO: 30596 - DNA, 15 bp, Homo sapiens
agctactcgggaggc

SEQ ID NO: 30597 - DNA, 15 bp, Homo sapiens
gctactcgggaggct

SEQ ID NO: 30598 - DNA, 15 bp, Homo sapiens
ctactcgggaggctg

SEQ ID NO: 30599 - DNA, 15 bp, Homo sapiens
tactcgggaggctga

SEQ ID NO: 30600 - DNA, 15 bp, Homo sapiens
actcgggaggctgag

SEQ ID NO: 30601 - DNA, 15 bp, Homo sapiens
ctcgggaggctgagg

SEQ ID NO: 30602 - DNA, 15 bp, Homo sapiens
tcgggaggctgaggc

SEQ ID NO: 30603 - DNA, 15 bp, Homo sapiens
cgggaggctgaggca

SEQ ID NO: 30604 - DNA, 15 bp, Homo sapiens
gggaggctgaggcag

SEQ ID NO: 30605 - DNA, 15 bp, Homo sapiens
ggaggctgaggcagg

SEQ ID NO: 30606 - DNA, 15 bp, Homo sapiens
gaggctgaggcagga

SEQ ID NO: 30607 - DNA, 15 bp, Homo sapiens
aggctgaggcaggag

SEQ ID NO: 30608 - DNA, 15 bp, Homo sapiens
ggctgaggcaggaga

SEQ ID NO: 30609 - DNA, 15 bp, Homo sapiens
gctgaggcaggagaa

SEQ ID NO: 30610 - DNA, 15 bp, Homo sapiens
ctgaggcaggagaat

SEQ ID NO: 30611 - DNA, 15 bp, Homo sapiens
tgaggcaggagaatt

SEQ ID NO: 30612 - DNA, 15 bp, Homo sapiens
gaggcaggagaattg

SEQ ID NO: 30613 - DNA, 15 bp, Homo sapiens
aggcaggagaattgc

SEQ ID NO: 30614 - DNA, 15 bp, Homo sapiens
ggcaggagaattgct

SEQ ID NO: 30615 - DNA, 15 bp, Homo sapiens
gcaggagaattgctt

SEQ ID NO: 30616 - DNA, 15 bp, Homo sapiens
caggagaattgcttg

SEQ ID NO: 30617 - DNA, 15 bp, Homo sapiens
aggagaattgcttga

SEQ ID NO: 30618 - DNA, 15 bp, Homo sapiens
ggagaattgcttgaa

SEQ ID NO: 30619 - DNA, 15 bp, Homo sapiens
gagaattgcttgaac

SEQ ID NO: 30620 - DNA, 15 bp, Homo sapiens
agaattgcttgaact

SEQ ID NO: 30621 - DNA, 15 bp, Homo sapiens
gaattgcttgaactg

SEQ ID NO: 30622 - DNA, 15 bp, Homo sapiens
aattgcttgaactgc

SEQ ID NO: 30623 - DNA, 15 bp, Homo sapiens
attgcttgaactgcc

SEQ ID NO: 30624 - DNA, 15 bp, Homo sapiens
ttgcttgaactgcct

SEQ ID NO: 30625 - DNA, 15 bp, Homo sapiens
tgcttgaactgcctt

SEQ ID NO: 30626 - DNA, 15 bp, Homo sapiens
gcttgaactgccttg

SEQ ID NO: 30627 - DNA, 15 bp, Homo sapiens
cttgaactgccttga

SEQ ID NO: 30628 - DNA, 15 bp, Homo sapiens
ttgaactgccttgag

SEQ ID NO: 30629 - DNA, 15 bp, Homo sapiens
tgaactgccttgagg

SEQ ID NO: 30630 - DNA, 15 bp, Homo sapiens
gaactgccttgaggt

SEQ ID NO: 30631 - DNA, 15 bp, Homo sapiens
aactgccttgaggtg

SEQ ID NO: 30632 - DNA, 15 bp, Homo sapiens
actgccttgaggtgg

SEQ ID NO: 30633 - DNA, 15 bp, Homo sapiens
ctgccttgaggtggc

SEQ ID NO: 30634 - DNA, 15 bp, Homo sapiens
tgccttgaggtggcg

SEQ ID NO: 30635 - DNA, 15 bp, Homo sapiens
gccttgaggtggcgg

SEQ ID NO: 30636 - DNA, 15 bp, Homo sapiens
ccttgaggtggcgga

SEQ ID NO: 30637 - DNA, 15 bp, Homo sapiens
cttgaggtggcggag

SEQ ID NO: 30638 - DNA, 15 bp, Homo sapiens
ttgaggtggcggagg

SEQ ID NO: 30639 - DNA, 15 bp, Homo sapiens
tgaggtggcggaggc

SEQ ID NO: 30640 - DNA, 15 bp, Homo sapiens
gaggtggcggaggct

SEQ ID NO: 30641 - DNA, 15 bp, Homo sapiens
aggtggcggaggctg

SEQ ID NO: 30642 - DNA, 15 bp, Homo sapiens
ggtggcggaggctga

SEQ ID NO: 30643 - DNA, 15 bp, Homo sapiens
gtggcggaggctgaa

SEQ ID NO: 30644 - DNA, 15 bp, Homo sapiens
tggcggaggctgaag

SEQ ID NO: 30645 - DNA, 15 bp, Homo sapiens
ggcggaggctgaagt

SEQ ID NO: 30646 - DNA, 15 bp, Homo sapiens
gcggaggctgaagtg

SEQ ID NO: 30647 - DNA, 15 bp, Homo sapiens
cggaggctgaagtga

SEQ ID NO: 30648 - DNA, 15 bp, Homo sapiens
ggaggctgaagtgag

SEQ ID NO: 30649 - DNA, 15 bp, Homo sapiens
gaggctgaagtgagc

SEQ ID NO: 30650 - DNA, 15 bp, Homo sapiens
aggctgaagtgagcc

SEQ ID NO: 30651 - DNA, 15 bp, Homo sapiens
ggctgaagtgagccg

SEQ ID NO: 30652 - DNA, 15 bp, Homo sapiens
gctgaagtgagccga

SEQ ID NO: 30653 - DNA, 15 bp, Homo sapiens
ctgaagtgagccgag

SEQ ID NO: 30654 - DNA, 15 bp, Homo sapiens
tgaagtgagccgaga

SEQ ID NO: 30655 - DNA, 15 bp, Homo sapiens
gaagtgagccgagat

SEQ ID NO: 30656 - DNA, 15 bp, Homo sapiens
aagtgagccgagatc

SEQ ID NO: 30657 - DNA, 15 bp, Homo sapiens
agtgagccgagatca

SEQ ID NO: 30658 - DNA, 15 bp, Homo sapiens
gtgagccgagatcac

SEQ ID NO: 30659 - DNA, 15 bp, Homo sapiens
tgagccgagatcaca

SEQ ID NO: 30660 - DNA, 15 bp, Homo sapiens
gagccgagatcacac

SEQ ID NO: 30661 - DNA, 15 bp, Homo sapiens
agccgagatcacacc

SEQ ID NO: 30662 - DNA, 15 bp, Homo sapiens
gccgagatcacacca

SEQ ID NO: 30663 - DNA, 15 bp, Homo sapiens
ccgagatcacaccac

SEQ ID NO: 30664 - DNA, 15 bp, Homo sapiens
cgagatcacaccact

SEQ ID NO: 30665 - DNA, 15 bp, Homo sapiens
gagatcacaccactg

SEQ ID NO: 30666 - DNA, 15 bp, Homo sapiens
agatcacaccactgc

SEQ ID NO: 30667 - DNA, 15 bp, Homo sapiens
gatcacaccactgca

SEQ ID NO: 30668 - DNA, 15 bp, Homo sapiens
atcacaccactgcac

SEQ ID NO: 30669 - DNA, 15 bp, Homo sapiens
tcacaccactgcacg

SEQ ID NO: 30670 - DNA, 15 bp, Homo sapiens
cacaccactgcacgc

SEQ ID NO: 30671 - DNA, 15 bp, Homo sapiens
acaccactgcacgcc

SEQ ID NO: 30672 - DNA, 15 bp, Homo sapiens
caccactgcacgcca

SEQ ID NO: 30673 - DNA, 15 bp, Homo sapiens
accactgcacgccag

SEQ ID NO: 30674 - DNA, 15 bp, Homo sapiens
ccactgcacgccagc

SEQ ID NO: 30675 - DNA, 15 bp, Homo sapiens
cactgcacgccagcc

SEQ ID NO: 30676 - DNA, 15 bp, Homo sapiens
actgcacgccagcct

SEQ ID NO: 30677 - DNA, 15 bp, Homo sapiens
ctgcacgccagcctg

SEQ ID NO: 30678 - DNA, 15 bp, Homo sapiens
tgcacgccagcctgg

SEQ ID NO: 30679 - DNA, 15 bp, Homo sapiens
gcacgccagcctggg

SEQ ID NO: 30680 - DNA, 15 bp, Homo sapiens
cacgccagcctgggc

SEQ ID NO: 30681 - DNA, 15 bp, Homo sapiens
acgccagcctgggca

SEQ ID NO: 30682 - DNA, 15 bp, Homo sapiens
cgccagcctgggcaa

SEQ ID NO: 30683 - DNA, 15 bp, Homo sapiens
gccagcctgggcaac

SEQ ID NO: 30684 - DNA, 15 bp, Homo sapiens
cctgggcaacagagc

SEQ ID NO: 30685 - DNA, 15 bp, Homo sapiens
ctgggcaacagagca

SEQ ID NO: 30686 - DNA, 15 bp, Homo sapiens
tgggcaacagagcaa

SEQ ID NO: 30687 - DNA, 15 bp, Homo sapiens
gggcaacagagcaag

SEQ ID NO: 30688 - DNA, 15 bp, Homo sapiens
ggcaacagagcaaga

SEQ ID NO: 30689 - DNA, 15 bp, Homo sapiens
gcaacagagcaagac

SEQ ID NO: 30690 - DNA, 15 bp, Homo sapiens
caacagagcaagact

SEQ ID NO: 30691 - DNA, 15 bp, Homo sapiens
aacagagcaagactc

SEQ ID NO: 30692 - DNA, 15 bp, Homo sapiens
acagagcaagactct

SEQ ID NO: 30693 - DNA, 15 bp, Homo sapiens
cagagcaagactctg

SEQ ID NO: 30694 - DNA, 15 bp, Homo sapiens
agagcaagactctgt

SEQ ID NO: 30695 - DNA, 15 bp, Homo sapiens
gagcaagactctgtc

SEQ ID NO: 30696 - DNA, 15 bp, Homo sapiens
agcaagactctgtct

SEQ ID NO: 30697 - DNA, 15 bp, Homo sapiens
gcaagactctgtctc

SEQ ID NO: 30698 - DNA, 15 bp, Homo sapiens
caagactctgtctca

SEQ ID NO: 30699 - DNA, 15 bp, Homo sapiens
aagactctgtctcaa

SEQ ID NO: 30700 - DNA, 15 bp, Homo sapiens
agactctgtctcaaa

SEQ ID NO: 30701 - DNA, 15 bp, Homo sapiens
gactctgtctcaaaa

SEQ ID NO: 30702 - DNA, 15 bp, Homo sapiens
actctgtctcaaaaa

SEQ ID NO: 30703 - DNA, 15 bp, Homo sapiens
ctctgtctcaaaaaa

SEQ ID NO: 30704 - DNA, 15 bp, Homo sapiens
tctgtctcaaaaaaa

SEQ ID NO: 30705 - DNA, 15 bp, Homo sapiens
ctgtctcaaaaaaaa

SEQ ID NO: 30706 - DNA, 15 bp, Homo sapiens
tgtctcaaaaaaaaa

SEQ ID NO: 30707 - DNA, 15 bp, Homo sapiens
gtctcaaaaaaaaac

SEQ ID NO: 30708 - DNA, 15 bp, Homo sapiens
tctcaaaaaaaaaca

SEQ ID NO: 30709 - DNA, 15 bp, Homo sapiens
ctcaaaaaaaaacaa

SEQ ID NO: 30710 - DNA, 15 bp, Homo sapiens
tcaaaaaaaaacaaa

SEQ ID NO: 30711 - DNA, 15 bp, Homo sapiens
caaaaaaaaacaaaa

SEQ ID NO: 30712 - DNA, 15 bp, Homo sapiens
aaaaaaaaacaaaaa

SEQ ID NO: 30713 - DNA, 15 bp, Homo sapiens
aaaaaaaacaaaaac

SEQ ID NO: 30714 - DNA, 15 bp, Homo sapiens
aaaaaaacaaaaaca

SEQ ID NO: 30715 - DNA, 15 bp, Homo sapiens
aaaaaacaaaaacaa

SEQ ID NO: 30716 - DNA, 15 bp, Homo sapiens
aaaaacaaaaacaaa

SEQ ID NO: 30717 - DNA, 15 bp, Homo sapiens
aaaacaaaaacaaaa

SEQ ID NO: 30718 - DNA, 15 bp, Homo sapiens
aaacaaaaacaaaaa

SEQ ID NO: 30719 - DNA, 15 bp, Homo sapiens
aacaaaaacaaaaaa

SEQ ID NO: 30720 - DNA, 15 bp, Homo sapiens
acaaaaacaaaaaac

SEQ ID NO: 30721 - DNA, 15 bp, Homo sapiens
caaaaacaaaaaaca

SEQ ID NO: 30722 - DNA, 15 bp, Homo sapiens
aaaaacaaaaaacaa

SEQ ID NO: 30723 - DNA, 15 bp, Homo sapiens
aaaacaaaaaacaaa

SEQ ID NO: 30724 - DNA, 15 bp, Homo sapiens
aaacaaaaaacaaaa

SEQ ID NO: 30725 - DNA, 15 bp, Homo sapiens
aacaaaaaacaaaaa

SEQ ID NO: 30726 - DNA, 15 bp, Homo sapiens
acaaaaaacaaaaaa

SEQ ID NO: 30727 - DNA, 15 bp, Homo sapiens
caaaaaacaaaaaaa

SEQ ID NO: 30728 - DNA, 15 bp, Homo sapiens
aaaaaacaaaaaaaa

SEQ ID NO: 30729 - DNA, 15 bp, Homo sapiens
aaaaacaaaaaaaaa

SEQ ID NO: 30730 - DNA, 15 bp, Homo sapiens
aaaacaaaaaaaaaa

SEQ ID NO: 30731 - DNA, 15 bp, Homo sapiens
aaacaaaaaaaaaat

SEQ ID NO: 30732 - DNA, 15 bp, Homo sapiens
aacaaaaaaaaaatt

SEQ ID NO: 30733 - DNA, 15 bp, Homo sapiens
acaaaaaaaaaattt

SEQ ID NO: 30734 - DNA, 15 bp, Homo sapiens
caaaaaaaaaatttg

SEQ ID NO: 30735 - DNA, 15 bp, Homo sapiens
aaaaaaaaaatttga

SEQ ID NO: 30736 - DNA, 15 bp, Homo sapiens
aaaaaaaaatttgaa

SEQ ID NO: 30737 - DNA, 15 bp, Homo sapiens
aaaaaaaatttgaat

SEQ ID NO: 30738 - DNA, 15 bp, Homo sapiens
aaaaaaatttgaatc

SEQ ID NO: 30739 - DNA, 15 bp, Homo sapiens
aaaaaatttgaatcg

SEQ ID NO: 30740 - DNA, 15 bp, Homo sapiens
aaaaatttgaatcgt

SEQ ID NO: 30741 - DNA, 15 bp, Homo sapiens
aaaatttgaatcgtc

SEQ ID NO: 30742 - DNA, 15 bp, Homo sapiens
aaatttgaatcgtca

SEQ ID NO: 30743 - DNA, 15 bp, Homo sapiens
aatttgaatcgtcaa

SEQ ID NO: 30744 - DNA, 15 bp, Homo sapiens
atttgaatcgtcaaa

SEQ ID NO: 30745 - DNA, 15 bp, Homo sapiens
tttgaatcgtcaaat

SEQ ID NO: 30746 - DNA, 15 bp, Homo sapiens
ttgaatcgtcaaatc

SEQ ID NO: 30747 - DNA, 15 bp, Homo sapiens
tgaatcgtcaaatcc

SEQ ID NO: 30748 - DNA, 15 bp, Homo sapiens
gaatcgtcaaatcct

SEQ ID NO: 30749 - DNA, 15 bp, Homo sapiens
aatcgtcaaatccta

SEQ ID NO: 30750 - DNA, 15 bp, Homo sapiens
atcgtcaaatcctaa

SEQ ID NO: 30751 - DNA, 15 bp, Homo sapiens
tcgtcaaatcctaaa

SEQ ID NO: 30752 - DNA, 15 bp, Homo sapiens
cgtcaaatcctaaag

SEQ ID NO: 30753 - DNA, 15 bp, Homo sapiens
gtcaaatcctaaaga

SEQ ID NO: 30754 - DNA, 15 bp, Homo sapiens
tcaaatcctaaagaa

SEQ ID NO: 30755 - DNA, 15 bp, Homo sapiens
caaatcctaaagaac

SEQ ID NO: 30756 - DNA, 15 bp, Homo sapiens
aaatcctaaagaact

SEQ ID NO: 30757 - DNA, 15 bp, Homo sapiens
aatcctaaagaacta

SEQ ID NO: 30758 - DNA, 15 bp, Homo sapiens
atcctaaagaactag

SEQ ID NO: 30759 - DNA, 15 bp, Homo sapiens
tcctaaagaactagg

SEQ ID NO: 30760 - DNA, 15 bp, Homo sapiens
cctaaagaactaggc

SEQ ID NO: 30761 - DNA, 15 bp, Homo sapiens
ctaaagaactaggct

SEQ ID NO: 30762 - DNA, 15 bp, Homo sapiens
taaagaactaggctg

SEQ ID NO: 30763 - DNA, 15 bp, Homo sapiens
aaagaactaggctgc

SEQ ID NO: 30764 - DNA, 15 bp, Homo sapiens
aagaactaggctgct

SEQ ID NO: 30765 - DNA, 15 bp, Homo sapiens
agaactaggctgcta

SEQ ID NO: 30766 - DNA, 15 bp, Homo sapiens
gaactaggctgctat

SEQ ID NO: 30767 - DNA, 15 bp, Homo sapiens
aactaggctgctatt

SEQ ID NO: 30768 - DNA, 15 bp, Homo sapiens
actaggctgctatta

SEQ ID NO: 30769 - DNA, 15 bp, Homo sapiens
ctaggctgctattat

SEQ ID NO: 30770 - DNA, 15 bp, Homo sapiens
taggctgctattatc

SEQ ID NO: 30771 - DNA, 15 bp, Homo sapiens
aggctgctattatct

SEQ ID NO: 30772 - DNA, 15 bp, Homo sapiens
ggctgctattatcta

SEQ ID NO: 30773 - DNA, 15 bp, Homo sapiens
gctgctattatctag

SEQ ID NO: 30774 - DNA, 15 bp, Homo sapiens
ctgctattatctagt

SEQ ID NO: 30775 - DNA, 15 bp, Homo sapiens
tgctattatctagta

SEQ ID NO: 30776 - DNA, 15 bp, Homo sapiens
gctattatctagtat

SEQ ID NO: 30777 - DNA, 15 bp, Homo sapiens
ctattatctagtatt

SEQ ID NO: 30778 - DNA, 15 bp, Homo sapiens
tattatctagtatta

SEQ ID NO: 30779 - DNA, 15 bp, Homo sapiens
attatctagtattat

SEQ ID NO: 30780 - DNA, 15 bp, Homo sapiens
ttatctagtattata

SEQ ID NO: 30781 - DNA, 15 bp, Homo sapiens
tatctagtattatac

SEQ ID NO: 30782 - DNA, 15 bp, Homo sapiens
atctagtattatact

SEQ ID NO: 30783 - DNA, 15 bp, Homo sapiens
tctagtattatacta

SEQ ID NO: 30784 - DNA, 15 bp, Homo sapiens
ctagtattatactaa

SEQ ID NO: 30785 - DNA, 15 bp, Homo sapiens
tagtattatactaac

SEQ ID NO: 30786 - DNA, 15 bp, Homo sapiens
agtattatactaaca

SEQ ID NO: 30787 - DNA, 15 bp, Homo sapiens
gtattatactaacaa

SEQ ID NO: 30788 - DNA, 15 bp, Homo sapiens
tattatactaacaaa

SEQ ID NO: 30789 - DNA, 15 bp, Homo sapiens
attatactaacaaat

SEQ ID NO: 30790 - DNA, 15 bp, Homo sapiens
ttatactaacaaatg

SEQ ID NO: 30791 - DNA, 15 bp, Homo sapiens
tatactaacaaatga

SEQ ID NO: 30792 - DNA, 15 bp, Homo sapiens
atactaacaaatgaa

SEQ ID NO: 30793 - DNA, 15 bp, Homo sapiens
tactaacaaatgaag

SEQ ID NO: 30794 - DNA, 15 bp, Homo sapiens
actaacaaatgaagt

SEQ ID NO: 30795 - DNA, 15 bp, Homo sapiens
ctaacaaatgaagtg

SEQ ID NO: 30796 - DNA, 15 bp, Homo sapiens
taacaaatgaagtgc

SEQ ID NO: 30797 - DNA, 15 bp, Homo sapiens
aacaaatgaagtgcc

SEQ ID NO: 30798 - DNA, 15 bp, Homo sapiens
acaaatgaagtgccc

SEQ ID NO: 30799 - DNA, 15 bp, Homo sapiens
caaatgaagtgccca

SEQ ID NO: 30800 - DNA, 15 bp, Homo sapiens
aaatgaagtgcccac

SEQ ID NO: 30801 - DNA, 15 bp, Homo sapiens
aatgaagtgcccaca

SEQ ID NO: 30802 - DNA, 15 bp, Homo sapiens
atgaagtgcccacat

SEQ ID NO: 30803 - DNA, 15 bp, Homo sapiens
tgaagtgcccacatt

SEQ ID NO: 30804 - DNA, 15 bp, Homo sapiens
gaagtgcccacatta

SEQ ID NO: 30805 - DNA, 15 bp, Homo sapiens
aagtgcccacattaa

SEQ ID NO: 30806 - DNA, 15 bp, Homo sapiens
agtgcccacattaag

SEQ ID NO: 30807 - DNA, 15 bp, Homo sapiens
gtgcccacattaaga

SEQ ID NO: 30808 - DNA, 15 bp, Homo sapiens
tgcccacattaagac

SEQ ID NO: 30809 - DNA, 15 bp, Homo sapiens
gcccacattaagaca

SEQ ID NO: 30810 - DNA, 15 bp, Homo sapiens
cccacattaagacag

SEQ ID NO: 30811 - DNA, 15 bp, Homo sapiens
ccacattaagacagt

SEQ ID NO: 30812 - DNA, 15 bp, Homo sapiens
cacattaagacagta

SEQ ID NO: 30813 - DNA, 15 bp, Homo sapiens
acattaagacagtac

SEQ ID NO: 30814 - DNA, 15 bp, Homo sapiens
cattaagacagtaca

SEQ ID NO: 30815 - DNA, 15 bp, Homo sapiens
attaagacagtacat

SEQ ID NO: 30816 - DNA, 15 bp, Homo sapiens
ttaagacagtacata

SEQ ID NO: 30817 - DNA, 15 bp, Homo sapiens
taagacagtacataa

SEQ ID NO: 30818 - DNA, 15 bp, Homo sapiens
aagacagtacataat

SEQ ID NO: 30819 - DNA, 15 bp, Homo sapiens
agacagtacataatt

SEQ ID NO: 30820 - DNA, 15 bp, Homo sapiens
gacagtacataatta

SEQ ID NO: 30821 - DNA, 15 bp, Homo sapiens
acagtacataattat

SEQ ID NO: 30822 - DNA, 15 bp, Homo sapiens
cagtacataattatt

SEQ ID NO: 30823 - DNA, 15 bp, Homo sapiens
agtacataattatta

SEQ ID NO: 30824 - DNA, 15 bp, Homo sapiens
gtacataattattaa

SEQ ID NO: 30825 - DNA, 15 bp, Homo sapiens
tacataattattaac

SEQ ID NO: 30826 - DNA, 15 bp, Homo sapiens
acataattattaacg

SEQ ID NO: 30827 - DNA, 15 bp, Homo sapiens
cataattattaacga

SEQ ID NO: 30828 - DNA, 15 bp, Homo sapiens
ataattattaacgac

SEQ ID NO: 30829 - DNA, 15 bp, Homo sapiens
taattattaacgaca

SEQ ID NO: 30830 - DNA, 15 bp, Homo sapiens
aattattaacgacaa

SEQ ID NO: 30831 - DNA, 15 bp, Homo sapiens
attattaacgacaat

SEQ ID NO: 30832 - DNA, 15 bp, Homo sapiens
ttattaacgacaata

SEQ ID NO: 30833 - DNA, 15 bp, Homo sapiens
tattaacgacaatat

SEQ ID NO: 30834 - DNA, 15 bp, Homo sapiens
attaacgacaatatt

SEQ ID NO: 30835 - DNA, 15 bp, Homo sapiens
ttaacgacaatattt

SEQ ID NO: 30836 - DNA, 15 bp, Homo sapiens
taacgacaatatttc

SEQ ID NO: 30837 - DNA, 15 bp, Homo sapiens
aacgacaatatttct

SEQ ID NO: 30838 - DNA, 15 bp, Homo sapiens
acgacaatatttctc

SEQ ID NO: 30839 - DNA, 15 bp, Homo sapiens
cgacaatatttctca

SEQ ID NO: 30840 - DNA, 15 bp, Homo sapiens
gacaatatttctcat

SEQ ID NO: 30841 - DNA, 15 bp, Homo sapiens
acaatatttctcatc

SEQ ID NO: 30842 - DNA, 15 bp, Homo sapiens
caatatttctcatct

SEQ ID NO: 30843 - DNA, 15 bp, Homo sapiens
aatatttctcatctg

SEQ ID NO: 30844 - DNA, 15 bp, Homo sapiens
atatttctcatctgc

SEQ ID NO: 30845 - DNA, 15 bp, Homo sapiens
tatttctcatctgca

SEQ ID NO: 30846 - DNA, 15 bp, Homo sapiens
atttctcatctgcaa

SEQ ID NO: 30847 - DNA, 15 bp, Homo sapiens
tttctcatctgcaat

SEQ ID NO: 30848 - DNA, 15 bp, Homo sapiens
ttctcatctgcaatt

SEQ ID NO: 30849 - DNA, 15 bp, Homo sapiens
tctcatctgcaattt

SEQ ID NO: 30850 - DNA, 15 bp, Homo sapiens
ctcatctgcaatttt

SEQ ID NO: 30851 - DNA, 15 bp, Homo sapiens
tcatctgcaattttt

SEQ ID NO: 30852 - DNA, 15 bp, Homo sapiens
catctgcaattttta

SEQ ID NO: 30853 - DNA, 15 bp, Homo sapiens
atctgcaatttttaa

SEQ ID NO: 30854 - DNA, 15 bp, Homo sapiens
tctgcaatttttaaa

SEQ ID NO: 30855 - DNA, 15 bp, Homo sapiens
ctgcaatttttaaac

SEQ ID NO: 30856 - DNA, 15 bp, Homo sapiens
tgcaatttttaaaca

SEQ ID NO: 30857 - DNA, 15 bp, Homo sapiens
gcaatttttaaacat

SEQ ID NO: 30858 - DNA, 15 bp, Homo sapiens
caatttttaaacatg

SEQ ID NO: 30859 - DNA, 15 bp, Homo sapiens
aatttttaaacatgc

SEQ ID NO: 30860 - DNA, 15 bp, Homo sapiens
atttttaaacatgct

SEQ ID NO: 30861 - DNA, 15 bp, Homo sapiens
tttttaaacatgctt

SEQ ID NO: 30862 - DNA, 15 bp, Homo sapiens
ttttaaacatgcttt

SEQ ID NO: 30863 - DNA, 15 bp, Homo sapiens
tttaaacatgctttc

SEQ ID NO: 30864 - DNA, 15 bp, Homo sapiens
ttaaacatgctttct

SEQ ID NO: 30865 - DNA, 15 bp, Homo sapiens
taaacatgctttctc

SEQ ID NO: 30866 - DNA, 15 bp, Homo sapiens
aaacatgctttctca

SEQ ID NO: 30867 - DNA, 15 bp, Homo sapiens
aacatgctttctcaa

SEQ ID NO: 30868 - DNA, 15 bp, Homo sapiens
acatgctttctcaaa

SEQ ID NO: 30869 - DNA, 15 bp, Homo sapiens
catgctttctcaaat

SEQ ID NO: 30870 - DNA, 15 bp, Homo sapiens
atgctttctcaaata

SEQ ID NO: 30871 - DNA, 15 bp, Homo sapiens
tgctttctcaaataa

SEQ ID NO: 30872 - DNA, 15 bp, Homo sapiens
gctttctcaaataac

SEQ ID NO: 30873 - DNA, 15 bp, Homo sapiens
ctttctcaaataaca

SEQ ID NO: 30874 - DNA, 15 bp, Homo sapiens
tttctcaaataacaa

SEQ ID NO: 30875 - DNA, 15 bp, Homo sapiens
ttctcaaataacaaa

SEQ ID NO: 30876 - DNA, 15 bp, Homo sapiens
tctcaaataacaaac

SEQ ID NO: 30877 - DNA, 15 bp, Homo sapiens
ctcaaataacaaaca

SEQ ID NO: 30878 - DNA, 15 bp, Homo sapiens
tcaaataacaaacac

SEQ ID NO: 30879 - DNA, 15 bp, Homo sapiens
caaataacaaacacg

SEQ ID NO: 30880 - DNA, 15 bp, Homo sapiens
aaataacaaacacgt

SEQ ID NO: 30881 - DNA, 15 bp, Homo sapiens
aataacaaacacgta

SEQ ID NO: 30882 - DNA, 15 bp, Homo sapiens
ataacaaacacgtat

SEQ ID NO: 30883 - DNA, 15 bp, Homo sapiens
taacaaacacgtatt

SEQ ID NO: 30884 - DNA, 15 bp, Homo sapiens
aacaaacacgtattt

SEQ ID NO: 30885 - DNA, 15 bp, Homo sapiens
acaaacacgtatttt

SEQ ID NO: 30886 - DNA, 15 bp, Homo sapiens
caaacacgtattttt

SEQ ID NO: 30887 - DNA, 15 bp, Homo sapiens
aaacacgtatttttg

SEQ ID NO: 30888 - DNA, 15 bp, Homo sapiens
aacacgtatttttgt

SEQ ID NO: 30889 - DNA, 15 bp, Homo sapiens
acacgtatttttgta

SEQ ID NO: 30890 - DNA, 15 bp, Homo sapiens
cacgtatttttgtaa

SEQ ID NO: 30891 - DNA, 15 bp, Homo sapiens
acgtatttttgtaag

SEQ ID NO: 30892 - DNA, 15 bp, Homo sapiens
cgtatttttgtaagt

SEQ ID NO: 30893 - DNA, 15 bp, Homo sapiens
gtatttttgtaagtt

SEQ ID NO: 30894 - DNA, 15 bp, Homo sapiens
tatttttgtaagttt

SEQ ID NO: 30895 - DNA, 15 bp, Homo sapiens
atttttgtaagtttt

SEQ ID NO: 30896 - DNA, 15 bp, Homo sapiens
tttttgtaagtttta

SEQ ID NO: 30897 - DNA, 15 bp, Homo sapiens
ttttgtaagttttaa

SEQ ID NO: 30898 - DNA, 15 bp, Homo sapiens
tttgtaagttttaaa

SEQ ID NO: 30899 - DNA, 15 bp, Homo sapiens
ttgtaagttttaaag

SEQ ID NO: 30900 - DNA, 15 bp, Homo sapiens
tgtaagttttaaagg

SEQ ID NO: 30901 - DNA, 15 bp, Homo sapiens
gtaagttttaaaggc

SEQ ID NO: 30902 - DNA, 15 bp, Homo sapiens
taagttttaaaggca

SEQ ID NO: 30903 - DNA, 15 bp, Homo sapiens
aagttttaaaggcaa

SEQ ID NO: 30904 - DNA, 15 bp, Homo sapiens
agttttaaaggcaaa

SEQ ID NO: 30905 - DNA, 15 bp, Homo sapiens
gttttaaaggcaaag

SEQ ID NO: 30906 - DNA, 15 bp, Homo sapiens
ttttaaaggcaaagg

SEQ ID NO: 30907 - DNA, 15 bp, Homo sapiens
tttaaaggcaaaggg

SEQ ID NO: 30908 - DNA, 15 bp, Homo sapiens
ttaaaggcaaagggg

SEQ ID NO: 30909 - DNA, 15 bp, Homo sapiens
taaaggcaaaggggg

SEQ ID NO: 30910 - DNA, 15 bp, Homo sapiens
aaaggcaaagggggc

SEQ ID NO: 30911 - DNA, 15 bp, Homo sapiens
aaggcaaagggggca

SEQ ID NO: 30912 - DNA, 15 bp, Homo sapiens
aggcaaagggggcag

SEQ ID NO: 30913 - DNA, 15 bp, Homo sapiens
ggcaaagggggcaga

SEQ ID NO: 30914 - DNA, 15 bp, Homo sapiens
gcaaagggggcagaa

SEQ ID NO: 30915 - DNA, 15 bp, Homo sapiens
caaagggggcagaat

SEQ ID NO: 30916 - DNA, 15 bp, Homo sapiens
aaagggggcagaatg

SEQ ID NO: 30917 - DNA, 15 bp, Homo sapiens
aagggggcagaatga

SEQ ID NO: 30918 - DNA, 15 bp, Homo sapiens
agggggcagaatgat

SEQ ID NO: 30919 - DNA, 15 bp, Homo sapiens
gggggcagaatgatg

SEQ ID NO: 30920 - DNA, 15 bp, Homo sapiens
ggggcagaatgatga

SEQ ID NO: 30921 - DNA, 15 bp, Homo sapiens
gggcagaatgatgac

SEQ ID NO: 30922 - DNA, 15 bp, Homo sapiens
ggcagaatgatgaca

SEQ ID NO: 30923 - DNA, 15 bp, Homo sapiens
gcagaatgatgacag

SEQ ID NO: 30924 - DNA, 15 bp, Homo sapiens
cagaatgatgacaga

SEQ ID NO: 30925 - DNA, 15 bp, Homo sapiens
agaatgatgacagac

SEQ ID NO: 30926 - DNA, 15 bp, Homo sapiens
gaatgatgacagaca

SEQ ID NO: 30927 - DNA, 15 bp, Homo sapiens
aatgatgacagacat

SEQ ID NO: 30928 - DNA, 15 bp, Homo sapiens
atgatgacagacata

SEQ ID NO: 30929 - DNA, 15 bp, Homo sapiens
tgatgacagacataa

SEQ ID NO: 30930 - DNA, 15 bp, Homo sapiens
gatgacagacataaa

SEQ ID NO: 30931 - DNA, 15 bp, Homo sapiens
atgacagacataaaa

SEQ ID NO: 30932 - DNA, 15 bp, Homo sapiens
tgacagacataaaaa

SEQ ID NO: 30933 - DNA, 15 bp, Homo sapiens
gacagacataaaaag

SEQ ID NO: 30934 - DNA, 15 bp, Homo sapiens
acagacataaaaagc

SEQ ID NO: 30935 - DNA, 15 bp, Homo sapiens
cagacataaaaagct

SEQ ID NO: 30936 - DNA, 15 bp, Homo sapiens
agacataaaaagctc

SEQ ID NO: 30937 - DNA, 15 bp, Homo sapiens
gacataaaaagctca

SEQ ID NO: 30938 - DNA, 15 bp, Homo sapiens
acataaaaagctcac

SEQ ID NO: 30939 - DNA, 15 bp, Homo sapiens
cataaaaagctcaca

SEQ ID NO: 30940 - DNA, 15 bp, Homo sapiens
ataaaaagctcacat

SEQ ID NO: 30941 - DNA, 15 bp, Homo sapiens
taaaaagctcacatt

SEQ ID NO: 30942 - DNA, 15 bp, Homo sapiens
aaaaagctcacattt

SEQ ID NO: 30943 - DNA, 15 bp, Homo sapiens
aaaagctcacattta

SEQ ID NO: 30944 - DNA, 15 bp, Homo sapiens
aaagctcacatttaa

SEQ ID NO: 30945 - DNA, 15 bp, Homo sapiens
aagctcacatttaaa

SEQ ID NO: 30946 - DNA, 15 bp, Homo sapiens
agctcacatttaaat

SEQ ID NO: 30947 - DNA, 15 bp, Homo sapiens
gctcacatttaaatt

SEQ ID NO: 30948 - DNA, 15 bp, Homo sapiens
ctcacatttaaatta

SEQ ID NO: 30949 - DNA, 15 bp, Homo sapiens
tcacatttaaattac

SEQ ID NO: 30950 - DNA, 15 bp, Homo sapiens
cacatttaaattact

SEQ ID NO: 30951 - DNA, 15 bp, Homo sapiens
acatttaaattactg

SEQ ID NO: 30952 - DNA, 15 bp, Homo sapiens
catttaaattactgg

SEQ ID NO: 30953 - DNA, 15 bp, Homo sapiens
atttaaattactggt

SEQ ID NO: 30954 - DNA, 15 bp, Homo sapiens
tttaaattactggta

SEQ ID NO: 30955 - DNA, 15 bp, Homo sapiens
ttaaattactggtag

SEQ ID NO: 30956 - DNA, 15 bp, Homo sapiens
taaattactggtaga

SEQ ID NO: 30957 - DNA, 15 bp, Homo sapiens
aaattactggtagat

SEQ ID NO: 30958 - DNA, 15 bp, Homo sapiens
aattactggtagatt

SEQ ID NO: 30959 - DNA, 15 bp, Homo sapiens
attactggtagattt

SEQ ID NO: 30960 - DNA, 15 bp, Homo sapiens
ttactggtagatttt

SEQ ID NO: 30961 - DNA, 15 bp, Homo sapiens
tactggtagatttta

SEQ ID NO: 30962 - DNA, 15 bp, Homo sapiens
actggtagattttat

SEQ ID NO: 30963 - DNA, 15 bp, Homo sapiens
ctggtagattttatt

SEQ ID NO: 30964 - DNA, 15 bp, Homo sapiens
tggtagattttatta

SEQ ID NO: 30965 - DNA, 15 bp, Homo sapiens
ggtagattttattaa

SEQ ID NO: 30966 - DNA, 15 bp, Homo sapiens
gtagattttattaaa

SEQ ID NO: 30967 - DNA, 15 bp, Homo sapiens
tagattttattaaaa

SEQ ID NO: 30968 - DNA, 15 bp, Homo sapiens
agattttattaaaaa

SEQ ID NO: 30969 - DNA, 15 bp, Homo sapiens
gattttattaaaaaa

SEQ ID NO: 30970 - DNA, 15 bp, Homo sapiens
attttattaaaaaaa

SEQ ID NO: 30971 - DNA, 15 bp, Homo sapiens
ttttattaaaaaaaa

SEQ ID NO: 30972 - DNA, 15 bp, Homo sapiens
tttattaaaaaaaag

SEQ ID NO: 30973 - DNA, 15 bp, Homo sapiens
ttattaaaaaaaaga

SEQ ID NO: 30974 - DNA, 15 bp, Homo sapiens
tattaaaaaaaagaa

SEQ ID NO: 30975 - DNA, 15 bp, Homo sapiens
attaaaaaaaagaaa

SEQ ID NO: 30976 - DNA, 15 bp, Homo sapiens
ttaaaaaaaagaaaa

SEQ ID NO: 30977 - DNA, 15 bp, Homo sapiens
taaaaaaaagaaaaa

SEQ ID NO: 30978 - DNA, 15 bp, Homo sapiens
aaaaaaaagaaaaaa

SEQ ID NO: 30979 - DNA, 15 bp, Homo sapiens
aaaaaaagaaaaaag

SEQ ID NO: 30980 - DNA, 15 bp, Homo sapiens
aaaaaagaaaaaaga

SEQ ID NO: 30981 - DNA, 15 bp, Homo sapiens
aaaaagaaaaaagaa

SEQ ID NO: 30982 - DNA, 15 bp, Homo sapiens
aaaagaaaaaagaaa

SEQ ID NO: 30983 - DNA, 15 bp, Homo sapiens
aaagaaaaaagaaaa

SEQ ID NO: 30984 - DNA, 15 bp, Homo sapiens
aagaaaaaagaaaaa

SEQ ID NO: 30985 - DNA, 15 bp, Homo sapiens
agaaaaaagaaaaaa

SEQ ID NO: 30986 - DNA, 15 bp, Homo sapiens
gaaaaaagaaaaaaa

SEQ ID NO: 30987 - DNA, 15 bp, Homo sapiens
aaaaaagaaaaaaaa

SEQ ID NO: 30988 - DNA, 15 bp, Homo sapiens
aaaaagaaaaaaaaa

SEQ ID NO: 30989 - DNA, 15 bp, Homo sapiens
aaaagaaaaaaaaag

SEQ ID NO: 30990 - DNA, 15 bp, Homo sapiens
aaagaaaaaaaaaga

SEQ ID NO: 30991 - DNA, 15 bp, Homo sapiens
aagaaaaaaaaagat

SEQ ID NO: 30992 - DNA, 15 bp, Homo sapiens
agaaaaaaaaagata

SEQ ID NO: 30993 - DNA, 15 bp, Homo sapiens
gaaaaaaaaagataa

SEQ ID NO: 30994 - DNA, 15 bp, Homo sapiens
aaaaaaaaagataag

SEQ ID NO: 30995 - DNA, 15 bp, Homo sapiens
aaaaaaaagataaga

SEQ ID NO: 30996 - DNA, 15 bp, Homo sapiens
aaaaaaagataagac

SEQ ID NO: 30997 - DNA, 15 bp, Homo sapiens
aaaaaagataagact

SEQ ID NO: 30998 - DNA, 15 bp, Homo sapiens
aaaaagataagactg

SEQ ID NO: 30999 - DNA, 15 bp, Homo sapiens
aaaagataagactgt

SEQ ID NO: 31000 - DNA, 15 bp, Homo sapiens
aaagataagactgta

SEQ ID NO: 31001 - DNA, 15 bp, Homo sapiens
aagataagactgtaa

SEQ ID NO: 31002 - DNA, 15 bp, Homo sapiens
agataagactgtaat

SEQ ID NO: 31003 - DNA, 15 bp, Homo sapiens
gataagactgtaatt

SEQ ID NO: 31004 - DNA, 15 bp, Homo sapiens
ataagactgtaatta

SEQ ID NO: 31005 - DNA, 15 bp, Homo sapiens
taagactgtaattac

SEQ ID NO: 31006 - DNA, 15 bp, Homo sapiens
aagactgtaattact

SEQ ID NO: 31007 - DNA, 15 bp, Homo sapiens
agactgtaattactt

SEQ ID NO: 31008 - DNA, 15 bp, Homo sapiens
gactgtaattacttc

SEQ ID NO: 31009 - DNA, 15 bp, Homo sapiens
actgtaattacttcc

SEQ ID NO: 31010 - DNA, 15 bp, Homo sapiens
ctgtaattacttccc

SEQ ID NO: 31011 - DNA, 15 bp, Homo sapiens
tgtaattacttccca

SEQ ID NO: 31012 - DNA, 15 bp, Homo sapiens
gtaattacttcccaa

SEQ ID NO: 31013 - DNA, 15 bp, Homo sapiens
taattacttcccaaa

SEQ ID NO: 31014 - DNA, 15 bp, Homo sapiens
aattacttcccaaat

SEQ ID NO: 31015 - DNA, 15 bp, Homo sapiens
attacttcccaaata

SEQ ID NO: 31016 - DNA, 15 bp, Homo sapiens
ttacttcccaaataa

SEQ ID NO: 31017 - DNA, 15 bp, Homo sapiens
tacttcccaaataag

SEQ ID NO: 31018 - DNA, 15 bp, Homo sapiens
acttcccaaataagg

SEQ ID NO: 31019 - DNA, 15 bp, Homo sapiens
cttcccaaataagga

SEQ ID NO: 31020 - DNA, 15 bp, Homo sapiens
ttcccaaataaggaa

SEQ ID NO: 31021 - DNA, 15 bp, Homo sapiens
tcccaaataaggaat

SEQ ID NO: 31022 - DNA, 15 bp, Homo sapiens
cccaaataaggaatg

SEQ ID NO: 31023 - DNA, 15 bp, Homo sapiens
ccaaataaggaatgc

SEQ ID NO: 31024 - DNA, 15 bp, Homo sapiens
caaataaggaatgcc

SEQ ID NO: 31025 - DNA, 15 bp, Homo sapiens
aaataaggaatgcca

SEQ ID NO: 31026 - DNA, 15 bp, Homo sapiens
aataaggaatgccaa

SEQ ID NO: 31027 - DNA, 15 bp, Homo sapiens
ataaggaatgccaag

SEQ ID NO: 31028 - DNA, 15 bp, Homo sapiens
taaggaatgccaagt

SEQ ID NO: 31029 - DNA, 15 bp, Homo sapiens
aaggaatgccaagta

SEQ ID NO: 31030 - DNA, 15 bp, Homo sapiens
aggaatgccaagtac

SEQ ID NO: 31031 - DNA, 15 bp, Homo sapiens
ggaatgccaagtacc

SEQ ID NO: 31032 - DNA, 15 bp, Homo sapiens
gaatgccaagtacct

SEQ ID NO: 31033 - DNA, 15 bp, Homo sapiens
aatgccaagtacctt

SEQ ID NO: 31034 - DNA, 15 bp, Homo sapiens
atgccaagtaccttt

SEQ ID NO: 31035 - DNA, 15 bp, Homo sapiens
tgccaagtacctttt

SEQ ID NO: 31036 - DNA, 15 bp, Homo sapiens
gccaagtacctttta

SEQ ID NO: 31037 - DNA, 15 bp, Homo sapiens
ccaagtaccttttat

SEQ ID NO: 31038 - DNA, 15 bp, Homo sapiens
caagtaccttttatt

SEQ ID NO: 31039 - DNA, 15 bp, Homo sapiens
aagtaccttttattc

SEQ ID NO: 31040 - DNA, 15 bp, Homo sapiens
agtaccttttattcc

SEQ ID NO: 31041 - DNA, 15 bp, Homo sapiens
gtaccttttattcct

SEQ ID NO: 31042 - DNA, 15 bp, Homo sapiens
taccttttattccta

SEQ ID NO: 31043 - DNA, 15 bp, Homo sapiens
accttttattcctaa

SEQ ID NO: 31044 - DNA, 15 bp, Homo sapiens
ccttttattcctaaa

SEQ ID NO: 31045 - DNA, 15 bp, Homo sapiens
cttttattcctaaaa

SEQ ID NO: 31046 - DNA, 15 bp, Homo sapiens
ttttattcctaaaag

SEQ ID NO: 31047 - DNA, 15 bp, Homo sapiens
tttattcctaaaaga

SEQ ID NO: 31048 - DNA, 15 bp, Homo sapiens
ttattcctaaaagaa

SEQ ID NO: 31049 - DNA, 15 bp, Homo sapiens
tattcctaaaagaaa

SEQ ID NO: 31050 - DNA, 15 bp, Homo sapiens
attcctaaaagaaat

SEQ ID NO: 31051 - DNA, 15 bp, Homo sapiens
ttcctaaaagaaatt

SEQ ID NO: 31052 - DNA, 15 bp, Homo sapiens
tcctaaaagaaatta

SEQ ID NO: 31053 - DNA, 15 bp, Homo sapiens
cctaaaagaaattac

SEQ ID NO: 31054 - DNA, 15 bp, Homo sapiens
ctaaaagaaattact

SEQ ID NO: 31055 - DNA, 15 bp, Homo sapiens
taaaagaaattactt

SEQ ID NO: 31056 - DNA, 15 bp, Homo sapiens
aaaagaaattacttg

SEQ ID NO: 31057 - DNA, 15 bp, Homo sapiens
aaagaaattacttgg

SEQ ID NO: 31058 - DNA, 15 bp, Homo sapiens
aagaaattacttggc

SEQ ID NO: 31059 - DNA, 15 bp, Homo sapiens
agaaattacttggcc

SEQ ID NO: 31060 - DNA, 15 bp, Homo sapiens
gaaattacttggcca

SEQ ID NO: 31061 - DNA, 15 bp, Homo sapiens
aaattacttggccag

SEQ ID NO: 31062 - DNA, 15 bp, Homo sapiens
aattacttggccagg

SEQ ID NO: 31063 - DNA, 15 bp, Homo sapiens
attacttggccaggt

SEQ ID NO: 31064 - DNA, 15 bp, Homo sapiens
ttacttggccaggtg

SEQ ID NO: 31065 - DNA, 15 bp, Homo sapiens
tacttggccaggtgc

SEQ ID NO: 31066 - DNA, 15 bp, Homo sapiens
acttggccaggtgca

SEQ ID NO: 31067 - DNA, 15 bp, Homo sapiens
cttggccaggtgcag

SEQ ID NO: 31068 - DNA, 15 bp, Homo sapiens
ttggccaggtgcagt

SEQ ID NO: 31069 - DNA, 15 bp, Homo sapiens
tggccaggtgcagtg

SEQ ID NO: 31070 - DNA, 15 bp, Homo sapiens
ggccaggtgcagtgg

SEQ ID NO: 31071 - DNA, 15 bp, Homo sapiens
gccaggtgcagtggc

SEQ ID NO: 31072 - DNA, 15 bp, Homo sapiens
ccaggtgcagtggct

SEQ ID NO: 31073 - DNA, 15 bp, Homo sapiens
caggtgcagtggctc

SEQ ID NO: 31074 - DNA, 15 bp, Homo sapiens
aggtgcagtggctca

SEQ ID NO: 31075 - DNA, 15 bp, Homo sapiens
ggtgcagtggctcac

SEQ ID NO: 31076 - DNA, 15 bp, Homo sapiens
gtgcagtggctcacg

SEQ ID NO: 31077 - DNA, 15 bp, Homo sapiens
tgcagtggctcacgc

SEQ ID NO: 31078 - DNA, 15 bp, Homo sapiens
gcagtggctcacgcc

SEQ ID NO: 31079 - DNA, 15 bp, Homo sapiens
cagtggctcacgcct

SEQ ID NO: 31080 - DNA, 15 bp, Homo sapiens
agtggctcacgccta

SEQ ID NO: 31081 - DNA, 15 bp, Homo sapiens
gtggctcacgcctat

SEQ ID NO: 31082 - DNA, 15 bp, Homo sapiens
tggctcacgcctata

SEQ ID NO: 31083 - DNA, 15 bp, Homo sapiens
ggctcacgcctataa

SEQ ID NO: 31084 - DNA, 15 bp, Homo sapiens
gctcacgcctataat

SEQ ID NO: 31085 - DNA, 15 bp, Homo sapiens
ctcacgcctataatc

SEQ ID NO: 31086 - DNA, 15 bp, Homo sapiens
tcacgcctataatcc

SEQ ID NO: 31087 - DNA, 15 bp, Homo sapiens
cacgcctataatcct

SEQ ID NO: 31088 - DNA, 15 bp, Homo sapiens
acgcctataatccta

SEQ ID NO: 31089 - DNA, 15 bp, Homo sapiens
cgcctataatcctaa

SEQ ID NO: 31090 - DNA, 15 bp, Homo sapiens
gcctataatcctaat

SEQ ID NO: 31091 - DNA, 15 bp, Homo sapiens
cctataatcctaatg

SEQ ID NO: 31092 - DNA, 15 bp, Homo sapiens
ctataatcctaatgc

SEQ ID NO: 31093 - DNA, 15 bp, Homo sapiens
tataatcctaatgct

SEQ ID NO: 31094 - DNA, 15 bp, Homo sapiens
ataatcctaatgctt

SEQ ID NO: 31095 - DNA, 15 bp, Homo sapiens
taatcctaatgcttt

SEQ ID NO: 31096 - DNA, 15 bp, Homo sapiens
aatcctaatgctttg

SEQ ID NO: 31097 - DNA, 15 bp, Homo sapiens
atcctaatgctttgg

SEQ ID NO: 31098 - DNA, 15 bp, Homo sapiens
tcctaatgctttggg

SEQ ID NO: 31099 - DNA, 15 bp, Homo sapiens
cctaatgctttggga

SEQ ID NO: 31100 - DNA, 15 bp, Homo sapiens
ctaatgctttgggag

SEQ ID NO: 31101 - DNA, 15 bp, Homo sapiens
taatgctttgggagg

SEQ ID NO: 31102 - DNA, 15 bp, Homo sapiens
aatgctttgggaggc

SEQ ID NO: 31103 - DNA, 15 bp, Homo sapiens
atgctttgggaggct

SEQ ID NO: 31104 - DNA, 15 bp, Homo sapiens
tgctttgggaggctg

SEQ ID NO: 31105 - DNA, 15 bp, Homo sapiens
gctttgggaggctga

SEQ ID NO: 31106 - DNA, 15 bp, Homo sapiens
ctttgggaggctgag

SEQ ID NO: 31107 - DNA, 15 bp, Homo sapiens
tttgggaggctgagg

SEQ ID NO: 31108 - DNA, 15 bp, Homo sapiens
ttgggaggctgaggt

SEQ ID NO: 31109 - DNA, 15 bp, Homo sapiens
tgggaggctgaggtg

SEQ ID NO: 31110 - DNA, 15 bp, Homo sapiens
gggaggctgaggtgg

SEQ ID NO: 31111 - DNA, 15 bp, Homo sapiens
ggaggctgaggtgga

SEQ ID NO: 31112 - DNA, 15 bp, Homo sapiens
gaggctgaggtggaa

SEQ ID NO: 31113 - DNA, 15 bp, Homo sapiens
aggctgaggtggaag

SEQ ID NO: 31114 - DNA, 15 bp, Homo sapiens
ggctgaggtggaagc

SEQ ID NO: 31115 - DNA, 15 bp, Homo sapiens
gctgaggtggaagcc

SEQ ID NO: 31116 - DNA, 15 bp, Homo sapiens
ctgaggtggaagcca

SEQ ID NO: 31117 - DNA, 15 bp, Homo sapiens
tgaggtggaagccaa

SEQ ID NO: 31118 - DNA, 15 bp, Homo sapiens
gaggtggaagccaag

SEQ ID NO: 31119 - DNA, 15 bp, Homo sapiens
aggtggaagccaagg

SEQ ID NO: 31120 - DNA, 15 bp, Homo sapiens
ggtggaagccaagga

SEQ ID NO: 31121 - DNA, 15 bp, Homo sapiens
gtggaagccaaggag

SEQ ID NO: 31122 - DNA, 15 bp, Homo sapiens
tggaagccaaggagt

SEQ ID NO: 31123 - DNA, 15 bp, Homo sapiens
ggaagccaaggagtt

SEQ ID NO: 31124 - DNA, 15 bp, Homo sapiens
gaagccaaggagttt

SEQ ID NO: 31125 - DNA, 15 bp, Homo sapiens
aagccaaggagtttc

SEQ ID NO: 31126 - DNA, 15 bp, Homo sapiens
agccaaggagtttca

SEQ ID NO: 31127 - DNA, 15 bp, Homo sapiens
gccaaggagtttcag

SEQ ID NO: 31128 - DNA, 15 bp, Homo sapiens
ccaaggagtttcagg

SEQ ID NO: 31129 - DNA, 15 bp, Homo sapiens
caaggagtttcaggc

SEQ ID NO: 31130 - DNA, 15 bp, Homo sapiens
aaggagtttcaggct

SEQ ID NO: 31131 - DNA, 15 bp, Homo sapiens
aggagtttcaggctg

SEQ ID NO: 31132 - DNA, 15 bp, Homo sapiens
ggagtttcaggctgc

SEQ ID NO: 31133 - DNA, 15 bp, Homo sapiens
gagtttcaggctgca

SEQ ID NO: 31134 - DNA, 15 bp, Homo sapiens
agtttcaggctgcag

SEQ ID NO: 31135 - DNA, 15 bp, Homo sapiens
gtttcaggctgcagt

SEQ ID NO: 31136 - DNA, 15 bp, Homo sapiens
tttcaggctgcagtg

SEQ ID NO: 31137 - DNA, 15 bp, Homo sapiens
ttcaggctgcagtga

SEQ ID NO: 31138 - DNA, 15 bp, Homo sapiens
tcaggctgcagtgag

SEQ ID NO: 31139 - DNA, 15 bp, Homo sapiens
caggctgcagtgagc

SEQ ID NO: 31140 - DNA, 15 bp, Homo sapiens
aggctgcagtgagct

SEQ ID NO: 31141 - DNA, 15 bp, Homo sapiens
ggctgcagtgagcta

SEQ ID NO: 31142 - DNA, 15 bp, Homo sapiens
gctgcagtgagctat

SEQ ID NO: 31143 - DNA, 15 bp, Homo sapiens
ctgcagtgagctatg

SEQ ID NO: 31144 - DNA, 15 bp, Homo sapiens
tgcagtgagctatga

SEQ ID NO: 31145 - DNA, 15 bp, Homo sapiens
gcagtgagctatgat

SEQ ID NO: 31146 - DNA, 15 bp, Homo sapiens
cagtgagctatgatc

SEQ ID NO: 31147 - DNA, 15 bp, Homo sapiens
agtgagctatgatca

SEQ ID NO: 31148 - DNA, 15 bp, Homo sapiens
gtgagctatgatcac

SEQ ID NO: 31149 - DNA, 15 bp, Homo sapiens
tgagctatgatcaca

SEQ ID NO: 31150 - DNA, 15 bp, Homo sapiens
gagctatgatcacac

SEQ ID NO: 31151 - DNA, 15 bp, Homo sapiens
agctatgatcacacc

SEQ ID NO: 31152 - DNA, 15 bp, Homo sapiens
gctatgatcacacca

SEQ ID NO: 31153 - DNA, 15 bp, Homo sapiens
ctatgatcacaccac

SEQ ID NO: 31154 - DNA, 15 bp, Homo sapiens
tatgatcacaccact

SEQ ID NO: 31155 - DNA, 15 bp, Homo sapiens
atgatcacaccactg

SEQ ID NO: 31156 - DNA, 15 bp, Homo sapiens
tgatcacaccactgt

SEQ ID NO: 31157 - DNA, 15 bp, Homo sapiens
gatcacaccactgtg

SEQ ID NO: 31158 - DNA, 15 bp, Homo sapiens
atcacaccactgtgt

SEQ ID NO: 31159 - DNA, 15 bp, Homo sapiens
tcacaccactgtgtt

SEQ ID NO: 31160 - DNA, 15 bp, Homo sapiens
cacaccactgtgttc

SEQ ID NO: 31161 - DNA, 15 bp, Homo sapiens
acaccactgtgttcc

SEQ ID NO: 31162 - DNA, 15 bp, Homo sapiens
caccactgtgttcca

SEQ ID NO: 31163 - DNA, 15 bp, Homo sapiens
accactgtgttccag

SEQ ID NO: 31164 - DNA, 15 bp, Homo sapiens
ccactgtgttccagc

SEQ ID NO: 31165 - DNA, 15 bp, Homo sapiens
cactgtgttccagcc

SEQ ID NO: 31166 - DNA, 15 bp, Homo sapiens
actgtgttccagcct

SEQ ID NO: 31167 - DNA, 15 bp, Homo sapiens
ctgtgttccagcctg

SEQ ID NO: 31168 - DNA, 15 bp, Homo sapiens
tgtgttccagcctgg

SEQ ID NO: 31169 - DNA, 15 bp, Homo sapiens
gtgttccagcctggg

SEQ ID NO: 31170 - DNA, 15 bp, Homo sapiens
tgttccagcctggga

SEQ ID NO: 31171 - DNA, 15 bp, Homo sapiens
gttccagcctgggag

SEQ ID NO: 31172 - DNA, 15 bp, Homo sapiens
ttccagcctgggaga

SEQ ID NO: 31173 - DNA, 15 bp, Homo sapiens
tccagcctgggagac

SEQ ID NO: 31174 - DNA, 15 bp, Homo sapiens
ccagcctgggagaca

SEQ ID NO: 31175 - DNA, 15 bp, Homo sapiens
cagcctgggagacaa

SEQ ID NO: 31176 - DNA, 15 bp, Homo sapiens
agcctgggagacaaa

SEQ ID NO: 31177 - DNA, 15 bp, Homo sapiens
gcctgggagacaaag

SEQ ID NO: 31178 - DNA, 15 bp, Homo sapiens
cctgggagacaaagc

SEQ ID NO: 31179 - DNA, 15 bp, Homo sapiens
ctgggagacaaagca

SEQ ID NO: 31180 - DNA, 15 bp, Homo sapiens
tgggagacaaagcaa

SEQ ID NO: 31181 - DNA, 15 bp, Homo sapiens
gggagacaaagcaag

SEQ ID NO: 31182 - DNA, 15 bp, Homo sapiens
ggagacaaagcaaga

SEQ ID NO: 31183 - DNA, 15 bp, Homo sapiens
gagacaaagcaagat

SEQ ID NO: 31184 - DNA, 15 bp, Homo sapiens
agacaaagcaagatc

SEQ ID NO: 31185 - DNA, 15 bp, Homo sapiens
gacaaagcaagatcc

SEQ ID NO: 31186 - DNA, 15 bp, Homo sapiens
acaaagcaagatcct

SEQ ID NO: 31187 - DNA, 15 bp, Homo sapiens
caaagcaagatcctg

SEQ ID NO: 31188 - DNA, 15 bp, Homo sapiens
aaagcaagatcctgt

SEQ ID NO: 31189 - DNA, 15 bp, Homo sapiens
aagcaagatcctgtc

SEQ ID NO: 31190 - DNA, 15 bp, Homo sapiens
agcaagatcctgtct

SEQ ID NO: 31191 - DNA, 15 bp, Homo sapiens
gcaagatcctgtctc

SEQ ID NO: 31192 - DNA, 15 bp, Homo sapiens
caagatcctgtctct

SEQ ID NO: 31193 - DNA, 15 bp, Homo sapiens
aagatcctgtctctt

SEQ ID NO: 31194 - DNA, 15 bp, Homo sapiens
agatcctgtctcttt

SEQ ID NO: 31195 - DNA, 15 bp, Homo sapiens
gatcctgtctctttt

SEQ ID NO: 31196 - DNA, 15 bp, Homo sapiens
atcctgtctctttta

SEQ ID NO: 31197 - DNA, 15 bp, Homo sapiens
tcctgtctcttttaa

SEQ ID NO: 31198 - DNA, 15 bp, Homo sapiens
cctgtctcttttaaa

SEQ ID NO: 31199 - DNA, 15 bp, Homo sapiens
ctgtctcttttaaaa

SEQ ID NO: 31200 - DNA, 15 bp, Homo sapiens
tgtctcttttaaaac

SEQ ID NO: 31201 - DNA, 15 bp, Homo sapiens
gtctcttttaaaaca

SEQ ID NO: 31202 - DNA, 15 bp, Homo sapiens
tctcttttaaaacaa

SEQ ID NO: 31203 - DNA, 15 bp, Homo sapiens
ctcttttaaaacaaa

SEQ ID NO: 31204 - DNA, 15 bp, Homo sapiens
tcttttaaaacaaaa

SEQ ID NO: 31205 - DNA, 15 bp, Homo sapiens
cttttaaaacaaaaa

SEQ ID NO: 31206 - DNA, 15 bp, Homo sapiens
ttttaaaacaaaaaa

SEQ ID NO: 31207 - DNA, 15 bp, Homo sapiens
tttaaaacaaaaaac

SEQ ID NO: 31208 - DNA, 15 bp, Homo sapiens
ttaaaacaaaaaaca

SEQ ID NO: 31209 - DNA, 15 bp, Homo sapiens
taaaacaaaaaacaa

SEQ ID NO: 31210 - DNA, 15 bp, Homo sapiens
aaacaaaaaacaaac

SEQ ID NO: 31211 - DNA, 15 bp, Homo sapiens
aacaaaaaacaaaca

SEQ ID NO: 31212 - DNA, 15 bp, Homo sapiens
acaaaaaacaaacaa

SEQ ID NO: 31213 - DNA, 15 bp, Homo sapiens
caaaaaacaaacaaa

SEQ ID NO: 31214 - DNA, 15 bp, Homo sapiens
aaaaaacaaacaaac

SEQ ID NO: 31215 - DNA, 15 bp, Homo sapiens
aaaaacaaacaaacc

SEQ ID NO: 31216 - DNA, 15 bp, Homo sapiens
aaaacaaacaaacca

SEQ ID NO: 31217 - DNA, 15 bp, Homo sapiens
aaacaaacaaaccaa

SEQ ID NO: 31218 - DNA, 15 bp, Homo sapiens
aacaaacaaaccaaa

SEQ ID NO: 31219 - DNA, 15 bp, Homo sapiens
acaaacaaaccaaaa

SEQ ID NO: 31220 - DNA, 15 bp, Homo sapiens
caaacaaaccaaaaa

SEQ ID NO: 31221 - DNA, 15 bp, Homo sapiens
aaacaaaccaaaaaa

SEQ ID NO: 31222 - DNA, 15 bp, Homo sapiens
aacaaaccaaaaaaa

SEQ ID NO: 31223 - DNA, 15 bp, Homo sapiens
acaaaccaaaaaaaa

SEQ ID NO: 31224 - DNA, 15 bp, Homo sapiens
caaaccaaaaaaaaa

SEQ ID NO: 31225 - DNA, 15 bp, Homo sapiens
aaaccaaaaaaaaaa

SEQ ID NO: 31226 - DNA, 15 bp, Homo sapiens
aaccaaaaaaaaaac

SEQ ID NO: 31227 - DNA, 15 bp, Homo sapiens
accaaaaaaaaaaca

SEQ ID NO: 31228 - DNA, 15 bp, Homo sapiens
ccaaaaaaaaaacaa

SEQ ID NO: 31229 - DNA, 15 bp, Homo sapiens
caaaaaaaaaacaaa

SEQ ID NO: 31230 - DNA, 15 bp, Homo sapiens
aaaaaaaaaacaaaa

SEQ ID NO: 31231 - DNA, 15 bp, Homo sapiens
aaaaaaaacaaaaaa

SEQ ID NO: 31232 - DNA, 15 bp, Homo sapiens
aaaaaaacaaaaaaa

SEQ ID NO: 31233 - DNA, 15 bp, Homo sapiens
aaacaaaaaaaaaac

SEQ ID NO: 31234 - DNA, 15 bp, Homo sapiens
aacaaaaaaaaaacc

SEQ ID NO: 31235 - DNA, 15 bp, Homo sapiens
acaaaaaaaaaacct

SEQ ID NO: 31236 - DNA, 15 bp, Homo sapiens
caaaaaaaaaaccta

SEQ ID NO: 31237 - DNA, 15 bp, Homo sapiens
aaaaaaaaaacctaa

SEQ ID NO: 31238 - DNA, 15 bp, Homo sapiens
aaaaaaaaacctaag

SEQ ID NO: 31239 - DNA, 15 bp, Homo sapiens
aaaaaaaacctaaga

SEQ ID NO: 31240 - DNA, 15 bp, Homo sapiens
aaaaaaacctaagaa

SEQ ID NO: 31241 - DNA, 15 bp, Homo sapiens
aaaaaacctaagaaa

SEQ ID NO: 31242 - DNA, 15 bp, Homo sapiens
aaaaacctaagaaat

SEQ ID NO: 31243 - DNA, 15 bp, Homo sapiens
aaaacctaagaaatg

SEQ ID NO: 31244 - DNA, 15 bp, Homo sapiens
aaacctaagaaatgt

SEQ ID NO: 31245 - DNA, 15 bp, Homo sapiens
aacctaagaaatgta

SEQ ID NO: 31246 - DNA, 15 bp, Homo sapiens
acctaagaaatgtaa

SEQ ID NO: 31247 - DNA, 15 bp, Homo sapiens
cctaagaaatgtaat

SEQ ID NO: 31248 - DNA, 15 bp, Homo sapiens
ctaagaaatgtaatt

SEQ ID NO: 31249 - DNA, 15 bp, Homo sapiens
taagaaatgtaatta

SEQ ID NO: 31250 - DNA, 15 bp, Homo sapiens
aagaaatgtaattaa

SEQ ID NO: 31251 - DNA, 15 bp, Homo sapiens
agaaatgtaattaat

SEQ ID NO: 31252 - DNA, 15 bp, Homo sapiens
gaaatgtaattaatc

SEQ ID NO: 31253 - DNA, 15 bp, Homo sapiens
aaatgtaattaatca

SEQ ID NO: 31254 - DNA, 15 bp, Homo sapiens
aatgtaattaatcat

SEQ ID NO: 31255 - DNA, 15 bp, Homo sapiens
atgtaattaatcatt

SEQ ID NO: 31256 - DNA, 15 bp, Homo sapiens
tgtaattaatcatta

SEQ ID NO: 31257 - DNA, 15 bp, Homo sapiens
gtaattaatcattaa

SEQ ID NO: 31258 - DNA, 15 bp, Homo sapiens
taattaatcattaag

SEQ ID NO: 31259 - DNA, 15 bp, Homo sapiens
aattaatcattaagt

SEQ ID NO: 31260 - DNA, 15 bp, Homo sapiens
attaatcattaagta

SEQ ID NO: 31261 - DNA, 15 bp, Homo sapiens
ttaatcattaagtag

SEQ ID NO: 31262 - DNA, 15 bp, Homo sapiens
taatcattaagtagc

SEQ ID NO: 31263 - DNA, 15 bp, Homo sapiens
aatcattaagtagct

SEQ ID NO: 31264 - DNA, 15 bp, Homo sapiens
atcattaagtagctg

SEQ ID NO: 31265 - DNA, 15 bp, Homo sapiens
tcattaagtagctgc

SEQ ID NO: 31266 - DNA, 15 bp, Homo sapiens
cattaagtagctgca

SEQ ID NO: 31267 - DNA, 15 bp, Homo sapiens
attaagtagctgcaa

SEQ ID NO: 31268 - DNA, 15 bp, Homo sapiens
ttaagtagctgcaaa

SEQ ID NO: 31269 - DNA, 15 bp, Homo sapiens
taagtagctgcaaat

SEQ ID NO: 31270 - DNA, 15 bp, Homo sapiens
aagtagctgcaaatt

SEQ ID NO: 31271 - DNA, 15 bp, Homo sapiens
agtagctgcaaattg

SEQ ID NO: 31272 - DNA, 15 bp, Homo sapiens
gtagctgcaaattga

SEQ ID NO: 31273 - DNA, 15 bp, Homo sapiens
tagctgcaaattgaa

SEQ ID NO: 31274 - DNA, 15 bp, Homo sapiens
agctgcaaattgaac

SEQ ID NO: 31275 - DNA, 15 bp, Homo sapiens
gctgcaaattgaact

SEQ ID NO: 31276 - DNA, 15 bp, Homo sapiens
ctgcaaattgaactg

SEQ ID NO: 31277 - DNA, 15 bp, Homo sapiens
tgcaaattgaactgt

SEQ ID NO: 31278 - DNA, 15 bp, Homo sapiens
gcaaattgaactgtt

SEQ ID NO: 31279 - DNA, 15 bp, Homo sapiens
caaattgaactgttc

SEQ ID NO: 31280 - DNA, 15 bp, Homo sapiens
aaattgaactgttct

SEQ ID NO: 31281 - DNA, 15 bp, Homo sapiens
aattgaactgttcta

SEQ ID NO: 31282 - DNA, 15 bp, Homo sapiens
attgaactgttctat

SEQ ID NO: 31283 - DNA, 15 bp, Homo sapiens
ttgaactgttctatt

SEQ ID NO: 31284 - DNA, 15 bp, Homo sapiens
tgaactgttctattt

SEQ ID NO: 31285 - DNA, 15 bp, Homo sapiens
gaactgttctatttt

SEQ ID NO: 31286 - DNA, 15 bp, Homo sapiens
aactgttctattttg

SEQ ID NO: 31287 - DNA, 15 bp, Homo sapiens
actgttctattttga

SEQ ID NO: 31288 - DNA, 15 bp, Homo sapiens
ctgttctattttgat

SEQ ID NO: 31289 - DNA, 15 bp, Homo sapiens
tgttctattttgata

SEQ ID NO: 31290 - DNA, 15 bp, Homo sapiens
gttctattttgatac

SEQ ID NO: 31291 - DNA, 15 bp, Homo sapiens
ttctattttgatact

SEQ ID NO: 31292 - DNA, 15 bp, Homo sapiens
tctattttgatactt

SEQ ID NO: 31293 - DNA, 15 bp, Homo sapiens
ctattttgatacttc

SEQ ID NO: 31294 - DNA, 15 bp, Homo sapiens
tattttgatacttcc

SEQ ID NO: 31295 - DNA, 15 bp, Homo sapiens
attttgatacttcct

SEQ ID NO: 31296 - DNA, 15 bp, Homo sapiens
ttttgatacttccta

SEQ ID NO: 31297 - DNA, 15 bp, Homo sapiens
tttgatacttcctaa

SEQ ID NO: 31298 - DNA, 15 bp, Homo sapiens
ttgatacttcctaag

SEQ ID NO: 31299 - DNA, 15 bp, Homo sapiens
tgatacttcctaaga

SEQ ID NO: 31300 - DNA, 15 bp, Homo sapiens
gatacttcctaagag

SEQ ID NO: 31301 - DNA, 15 bp, Homo sapiens
atacttcctaagagt

SEQ ID NO: 31302 - DNA, 15 bp, Homo sapiens
tacttcctaagagtg

SEQ ID NO: 31303 - DNA, 15 bp, Homo sapiens
acttcctaagagtgt

SEQ ID NO: 31304 - DNA, 15 bp, Homo sapiens
cttcctaagagtgtc

SEQ ID NO: 31305 - DNA, 15 bp, Homo sapiens
ttcctaagagtgtcc

SEQ ID NO: 31306 - DNA, 15 bp, Homo sapiens
tcctaagagtgtcca

SEQ ID NO: 31307 - DNA, 15 bp, Homo sapiens
cctaagagtgtccag

SEQ ID NO: 31308 - DNA, 15 bp, Homo sapiens
ctaagagtgtccagt

SEQ ID NO: 31309 - DNA, 15 bp, Homo sapiens
taagagtgtccagtg

SEQ ID NO: 31310 - DNA, 15 bp, Homo sapiens
aagagtgtccagtgt

SEQ ID NO: 31311 - DNA, 15 bp, Homo sapiens
agagtgtccagtgta

SEQ ID NO: 31312 - DNA, 15 bp, Homo sapiens
gagtgtccagtgtaa

SEQ ID NO: 31313 - DNA, 15 bp, Homo sapiens
agtgtccagtgtaat

SEQ ID NO: 31314 - DNA, 15 bp, Homo sapiens
gtgtccagtgtaatc

SEQ ID NO: 31315 - DNA, 15 bp, Homo sapiens
tgtccagtgtaatca

SEQ ID NO: 31316 - DNA, 15 bp, Homo sapiens
gtccagtgtaatcag

SEQ ID NO: 31317 - DNA, 15 bp, Homo sapiens
tccagtgtaatcaga

SEQ ID NO: 31318 - DNA, 15 bp, Homo sapiens
ccagtgtaatcagat

SEQ ID NO: 31319 - DNA, 15 bp, Homo sapiens
cagtgtaatcagatc

SEQ ID NO: 31320 - DNA, 15 bp, Homo sapiens
agtgtaatcagatca

SEQ ID NO: 31321 - DNA, 15 bp, Homo sapiens
gtgtaatcagatcat

SEQ ID NO: 31322 - DNA, 15 bp, Homo sapiens
tgtaatcagatcatt

SEQ ID NO: 31323 - DNA, 15 bp, Homo sapiens
gtaatcagatcattt

SEQ ID NO: 31324 - DNA, 15 bp, Homo sapiens
taatcagatcatttt

SEQ ID NO: 31325 - DNA, 15 bp, Homo sapiens
aatcagatcatttta

SEQ ID NO: 31326 - DNA, 15 bp, Homo sapiens
atcagatcattttat

SEQ ID NO: 31327 - DNA, 15 bp, Homo sapiens
tcagatcattttata

SEQ ID NO: 31328 - DNA, 15 bp, Homo sapiens
cagatcattttataa

SEQ ID NO: 31329 - DNA, 15 bp, Homo sapiens
agatcattttataat

SEQ ID NO: 31330 - DNA, 15 bp, Homo sapiens
gatcattttataatg

SEQ ID NO: 31331 - DNA, 15 bp, Homo sapiens
atcattttataatgg

SEQ ID NO: 31332 - DNA, 15 bp, Homo sapiens
tcattttataatggg

SEQ ID NO: 31333 - DNA, 15 bp, Homo sapiens
cattttataatgggt

SEQ ID NO: 31334 - DNA, 15 bp, Homo sapiens
attttataatgggtt

SEQ ID NO: 31335 - DNA, 15 bp, Homo sapiens
ttttataatgggtta

SEQ ID NO: 31336 - DNA, 15 bp, Homo sapiens
tttataatgggttat

SEQ ID NO: 31337 - DNA, 15 bp, Homo sapiens
ttataatgggttatt

SEQ ID NO: 31338 - DNA, 15 bp, Homo sapiens
tataatgggttattg

SEQ ID NO: 31339 - DNA, 15 bp, Homo sapiens
ataatgggttattga

SEQ ID NO: 31340 - DNA, 15 bp, Homo sapiens
taatgggttattgac

SEQ ID NO: 31341 - DNA, 15 bp, Homo sapiens
aatgggttattgacc

SEQ ID NO: 31342 - DNA, 15 bp, Homo sapiens
atgggttattgaccc

SEQ ID NO: 31343 - DNA, 15 bp, Homo sapiens
tgggttattgaccct

SEQ ID NO: 31344 - DNA, 15 bp, Homo sapiens
gggttattgacccta

SEQ ID NO: 31345 - DNA, 15 bp, Homo sapiens
ggttattgaccctag

SEQ ID NO: 31346 - DNA, 15 bp, Homo sapiens
gttattgaccctagg

SEQ ID NO: 31347 - DNA, 15 bp, Homo sapiens
ttattgaccctaggt

SEQ ID NO: 31348 - DNA, 15 bp, Homo sapiens
tattgaccctaggtg

SEQ ID NO: 31349 - DNA, 15 bp, Homo sapiens
attgaccctaggtgt

SEQ ID NO: 31350 - DNA, 15 bp, Homo sapiens
ttgaccctaggtgtc

SEQ ID NO: 31351 - DNA, 15 bp, Homo sapiens
tgaccctaggtgtcc

SEQ ID NO: 31352 - DNA, 15 bp, Homo sapiens
gaccctaggtgtcct

SEQ ID NO: 31353 - DNA, 15 bp, Homo sapiens
accctaggtgtcctt

SEQ ID NO: 31354 - DNA, 15 bp, Homo sapiens
ccctaggtgtccttt

SEQ ID NO: 31355 - DNA, 15 bp, Homo sapiens
cctaggtgtccttta

SEQ ID NO: 31356 - DNA, 15 bp, Homo sapiens
ctaggtgtcctttag

SEQ ID NO: 31357 - DNA, 15 bp, Homo sapiens
taggtgtcctttaga

SEQ ID NO: 31358 - DNA, 15 bp, Homo sapiens
aggtgtcctttagaa

SEQ ID NO: 31359 - DNA, 15 bp, Homo sapiens
ggtgtcctttagaac

SEQ ID NO: 31360 - DNA, 15 bp, Homo sapiens
gtgtcctttagaacc

SEQ ID NO: 31361 - DNA, 15 bp, Homo sapiens
tgtcctttagaacca

SEQ ID NO: 31362 - DNA, 15 bp, Homo sapiens
gtcctttagaaccac

SEQ ID NO: 31363 - DNA, 15 bp, Homo sapiens
tcctttagaaccacc

SEQ ID NO: 31364 - DNA, 15 bp, Homo sapiens
cctttagaaccacct

SEQ ID NO: 31365 - DNA, 15 bp, Homo sapiens
ctttagaaccacctg

SEQ ID NO: 31366 - DNA, 15 bp, Homo sapiens
tttagaaccacctgg

SEQ ID NO: 31367 - DNA, 15 bp, Homo sapiens
ttagaaccacctgga

SEQ ID NO: 31368 - DNA, 15 bp, Homo sapiens
tagaaccacctggaa

SEQ ID NO: 31369 - DNA, 15 bp, Homo sapiens
agaaccacctggaaa

SEQ ID NO: 31370 - DNA, 15 bp, Homo sapiens
gaaccacctggaaag

SEQ ID NO: 31371 - DNA, 15 bp, Homo sapiens
aaccacctggaaagc

SEQ ID NO: 31372 - DNA, 15 bp, Homo sapiens
accacctggaaagct

SEQ ID NO: 31373 - DNA, 15 bp, Homo sapiens
ccacctggaaagctt

SEQ ID NO: 31374 - DNA, 15 bp, Homo sapiens
cacctggaaagcttt

SEQ ID NO: 31375 - DNA, 15 bp, Homo sapiens
acctggaaagcttta

SEQ ID NO: 31376 - DNA, 15 bp, Homo sapiens
cctggaaagctttac

SEQ ID NO: 31377 - DNA, 15 bp, Homo sapiens
ctggaaagctttaca

SEQ ID NO: 31378 - DNA, 15 bp, Homo sapiens
tggaaagctttacaa

SEQ ID NO: 31379 - DNA, 15 bp, Homo sapiens
ggaaagctttacaaa

SEQ ID NO: 31380 - DNA, 15 bp, Homo sapiens
gaaagctttacaaaa

SEQ ID NO: 31381 - DNA, 15 bp, Homo sapiens
aaagctttacaaaaa

SEQ ID NO: 31382 - DNA, 15 bp, Homo sapiens
aagctttacaaaaaa

SEQ ID NO: 31383 - DNA, 15 bp, Homo sapiens
agctttacaaaaaaa

SEQ ID NO: 31384 - DNA, 15 bp, Homo sapiens
gctttacaaaaaaaa

SEQ ID NO: 31385 - DNA, 15 bp, Homo sapiens
ctttacaaaaaaaaa

SEQ ID NO: 31386 - DNA, 15 bp, Homo sapiens
tttacaaaaaaaaaa

SEQ ID NO: 31387 - DNA, 15 bp, Homo sapiens
ttacaaaaaaaaaaa

SEQ ID NO: 31388 - DNA, 15 bp, Homo sapiens
tacaaaaaaaaaaaa

SEQ ID NO: 31389 - DNA, 15 bp, Homo sapiens
acaaaaaaaaaaaaa

SEQ ID NO: 31390 - DNA, 15 bp, Homo sapiens
caaaaaaaaaaaaaa

SEQ ID NO: 31391 - DNA, 15 bp, Homo sapiens
aaaaaaaaaaaaaag

SEQ ID NO: 31392 - DNA, 15 bp, Homo sapiens
aaaaaaaaaaaaagg

SEQ ID NO: 31393 - DNA, 15 bp, Homo sapiens
aaaaaaaaaaaaggg

SEQ ID NO: 31394 - DNA, 15 bp, Homo sapiens
aaaaaaaaaaagggt

SEQ ID NO: 31395 - DNA, 15 bp, Homo sapiens
aaaaaaaaaagggtg

SEQ ID NO: 31396 - DNA, 15 bp, Homo sapiens
aaaaaaaaagggtga

SEQ ID NO: 31397 - DNA, 15 bp, Homo sapiens
aaaaaaaagggtgat

SEQ ID NO: 31398 - DNA, 15 bp, Homo sapiens
aaaaaaagggtgatt

SEQ ID NO: 31399 - DNA, 15 bp, Homo sapiens
aaaaaagggtgattt

SEQ ID NO: 31400 - DNA, 15 bp, Homo sapiens
aaaaagggtgatttt

SEQ ID NO: 31401 - DNA, 15 bp, Homo sapiens
aaaagggtgattttg

SEQ ID NO: 31402 - DNA, 15 bp, Homo sapiens
aaagggtgattttga

SEQ ID NO: 31403 - DNA, 15 bp, Homo sapiens
aagggtgattttgat

SEQ ID NO: 31404 - DNA, 15 bp, Homo sapiens
agggtgattttgatt

SEQ ID NO: 31405 - DNA, 15 bp, Homo sapiens
gggtgattttgattt

SEQ ID NO: 31406 - DNA, 15 bp, Homo sapiens
ggtgattttgattta

SEQ ID NO: 31407 - DNA, 15 bp, Homo sapiens
gtgattttgatttag

SEQ ID NO: 31408 - DNA, 15 bp, Homo sapiens
tgattttgatttagt

SEQ ID NO: 31409 - DNA, 15 bp, Homo sapiens
gattttgatttagtt

SEQ ID NO: 31410 - DNA, 15 bp, Homo sapiens
attttgatttagttg

SEQ ID NO: 31411 - DNA, 15 bp, Homo sapiens
ttttgatttagttgt

SEQ ID NO: 31412 - DNA, 15 bp, Homo sapiens
tttgatttagttgtt

SEQ ID NO: 31413 - DNA, 15 bp, Homo sapiens
ttgatttagttgtta

SEQ ID NO: 31414 - DNA, 15 bp, Homo sapiens
tgatttagttgttat

SEQ ID NO: 31415 - DNA, 15 bp, Homo sapiens
gatttagttgttatg

SEQ ID NO: 31416 - DNA, 15 bp, Homo sapiens
atttagttgttatgg

SEQ ID NO: 31417 - DNA, 15 bp, Homo sapiens
tttagttgttatgga

SEQ ID NO: 31418 - DNA, 15 bp, Homo sapiens
ttagttgttatggaa

SEQ ID NO: 31419 - DNA, 15 bp, Homo sapiens
tagttgttatggaat

SEQ ID NO: 31420 - DNA, 15 bp, Homo sapiens
agttgttatggaata

SEQ ID NO: 31421 - DNA, 15 bp, Homo sapiens
gttgttatggaatag

SEQ ID NO: 31422 - DNA, 15 bp, Homo sapiens
ttgttatggaatagg

SEQ ID NO: 31423 - DNA, 15 bp, Homo sapiens
tgttatggaatagga

SEQ ID NO: 31424 - DNA, 15 bp, Homo sapiens
gttatggaataggac

SEQ ID NO: 31425 - DNA, 15 bp, Homo sapiens
ttatggaataggacc

SEQ ID NO: 31426 - DNA, 15 bp, Homo sapiens
tatggaataggaccc

SEQ ID NO: 31427 - DNA, 15 bp, Homo sapiens
atggaataggaccca

SEQ ID NO: 31428 - DNA, 15 bp, Homo sapiens
tggaataggacccag

SEQ ID NO: 31429 - DNA, 15 bp, Homo sapiens
ggaataggacccagg

SEQ ID NO: 31430 - DNA, 15 bp, Homo sapiens
gaataggacccaggt

SEQ ID NO: 31431 - DNA, 15 bp, Homo sapiens
aataggacccaggta

SEQ ID NO: 31432 - DNA, 15 bp, Homo sapiens
ataggacccaggtat

SEQ ID NO: 31433 - DNA, 15 bp, Homo sapiens
taggacccaggtatc

SEQ ID NO: 31434 - DNA, 15 bp, Homo sapiens
aggacccaggtatca

SEQ ID NO: 31435 - DNA, 15 bp, Homo sapiens
ggacccaggtatcaa

SEQ ID NO: 31436 - DNA, 15 bp, Homo sapiens
gacccaggtatcaat

SEQ ID NO: 31437 - DNA, 15 bp, Homo sapiens
acccaggtatcaatt

SEQ ID NO: 31438 - DNA, 15 bp, Homo sapiens
cccaggtatcaattt

SEQ ID NO: 31439 - DNA, 15 bp, Homo sapiens
ccaggtatcaatttt

SEQ ID NO: 31440 - DNA, 15 bp, Homo sapiens
caggtatcaattttt

SEQ ID NO: 31441 - DNA, 15 bp, Homo sapiens
aggtatcaatttttt

SEQ ID NO: 31442 - DNA, 15 bp, Homo sapiens
ggtatcaatttttta

SEQ ID NO: 31443 - DNA, 15 bp, Homo sapiens
gtatcaattttttaa

SEQ ID NO: 31444 - DNA, 15 bp, Homo sapiens
tatcaattttttaaa

SEQ ID NO: 31445 - DNA, 15 bp, Homo sapiens
atcaattttttaaag

SEQ ID NO: 31446 - DNA, 15 bp, Homo sapiens
tcaattttttaaagc

SEQ ID NO: 31447 - DNA, 15 bp, Homo sapiens
caattttttaaagct

SEQ ID NO: 31448 - DNA, 15 bp, Homo sapiens
aattttttaaagctc

SEQ ID NO: 31449 - DNA, 15 bp, Homo sapiens
attttttaaagctct

SEQ ID NO: 31450 - DNA, 15 bp, Homo sapiens
ttttttaaagctctg

SEQ ID NO: 31451 - DNA, 15 bp, Homo sapiens
tttttaaagctctgc

SEQ ID NO: 31452 - DNA, 15 bp, Homo sapiens
ttttaaagctctgcc

SEQ ID NO: 31453 - DNA, 15 bp, Homo sapiens
tttaaagctctgcca

SEQ ID NO: 31454 - DNA, 15 bp, Homo sapiens
ttaaagctctgccag

SEQ ID NO: 31455 - DNA, 15 bp, Homo sapiens
taaagctctgccagg

SEQ ID NO: 31456 - DNA, 15 bp, Homo sapiens
aaagctctgccaggc

SEQ ID NO: 31457 - DNA, 15 bp, Homo sapiens
aagctctgccaggct

SEQ ID NO: 31458 - DNA, 15 bp, Homo sapiens
agctctgccaggcta

SEQ ID NO: 31459 - DNA, 15 bp, Homo sapiens
gctctgccaggctaa

SEQ ID NO: 31460 - DNA, 15 bp, Homo sapiens
ctctgccaggctaat

SEQ ID NO: 31461 - DNA, 15 bp, Homo sapiens
tctgccaggctaata

SEQ ID NO: 31462 - DNA, 15 bp, Homo sapiens
ctgccaggctaatat

SEQ ID NO: 31463 - DNA, 15 bp, Homo sapiens
tgccaggctaatatg

SEQ ID NO: 31464 - DNA, 15 bp, Homo sapiens
gccaggctaatatgt

SEQ ID NO: 31465 - DNA, 15 bp, Homo sapiens
ccaggctaatatgta

SEQ ID NO: 31466 - DNA, 15 bp, Homo sapiens
caggctaatatgtag

SEQ ID NO: 31467 - DNA, 15 bp, Homo sapiens
aggctaatatgtagc

SEQ ID NO: 31468 - DNA, 15 bp, Homo sapiens
ggctaatatgtagct

SEQ ID NO: 31469 - DNA, 15 bp, Homo sapiens
gctaatatgtagcta

SEQ ID NO: 31470 - DNA, 15 bp, Homo sapiens
ctaatatgtagctaa

SEQ ID NO: 31471 - DNA, 15 bp, Homo sapiens
taatatgtagctaag

SEQ ID NO: 31472 - DNA, 15 bp, Homo sapiens
aatatgtagctaaga

SEQ ID NO: 31473 - DNA, 15 bp, Homo sapiens
atatgtagctaagat

SEQ ID NO: 31474 - DNA, 15 bp, Homo sapiens
tatgtagctaagatt

SEQ ID NO: 31475 - DNA, 15 bp, Homo sapiens
atgtagctaagattg

SEQ ID NO: 31476 - DNA, 15 bp, Homo sapiens
tgtagctaagattga

SEQ ID NO: 31477 - DNA, 15 bp, Homo sapiens
gtagctaagattgag

SEQ ID NO: 31478 - DNA, 15 bp, Homo sapiens
tagctaagattgaga

SEQ ID NO: 31479 - DNA, 15 bp, Homo sapiens
agctaagattgagaa

SEQ ID NO: 31480 - DNA, 15 bp, Homo sapiens
gctaagattgagaat

SEQ ID NO: 31481 - DNA, 15 bp, Homo sapiens
ctaagattgagaatc

SEQ ID NO: 31482 - DNA, 15 bp, Homo sapiens
taagattgagaatca

SEQ ID NO: 31483 - DNA, 15 bp, Homo sapiens
aagattgagaatcac

SEQ ID NO: 31484 - DNA, 15 bp, Homo sapiens
agattgagaatcact

SEQ ID NO: 31485 - DNA, 15 bp, Homo sapiens
gattgagaatcacta

SEQ ID NO: 31486 - DNA, 15 bp, Homo sapiens
attgagaatcactaa

SEQ ID NO: 31487 - DNA, 15 bp, Homo sapiens
ttgagaatcactaag

SEQ ID NO: 31488 - DNA, 15 bp, Homo sapiens
tgagaatcactaagt

SEQ ID NO: 31489 - DNA, 15 bp, Homo sapiens
gagaatcactaagtc

SEQ ID NO: 31490 - DNA, 15 bp, Homo sapiens
agaatcactaagtca

SEQ ID NO: 31491 - DNA, 15 bp, Homo sapiens
gaatcactaagtcaa

SEQ ID NO: 31492 - DNA, 15 bp, Homo sapiens
aatcactaagtcaac

SEQ ID NO: 31493 - DNA, 15 bp, Homo sapiens
atcactaagtcaaca

SEQ ID NO: 31494 - DNA, 15 bp, Homo sapiens
tcactaagtcaacac

SEQ ID NO: 31495 - DNA, 15 bp, Homo sapiens
cactaagtcaacaca

SEQ ID NO: 31496 - DNA, 15 bp, Homo sapiens
actaagtcaacacat

SEQ ID NO: 31497 - DNA, 15 bp, Homo sapiens
ctaagtcaacacatt

SEQ ID NO: 31498 - DNA, 15 bp, Homo sapiens
taagtcaacacattt

SEQ ID NO: 31499 - DNA, 15 bp, Homo sapiens
aagtcaacacatttt

SEQ ID NO: 31500 - DNA, 15 bp, Homo sapiens
agtcaacacattttg

SEQ ID NO: 31501 - DNA, 15 bp, Homo sapiens
gtcaacacattttga

SEQ ID NO: 31502 - DNA, 15 bp, Homo sapiens
tcaacacattttgat

SEQ ID NO: 31503 - DNA, 15 bp, Homo sapiens
caacacattttgata

SEQ ID NO: 31504 - DNA, 15 bp, Homo sapiens
aacacattttgatat

SEQ ID NO: 31505 - DNA, 15 bp, Homo sapiens
acacattttgatata

SEQ ID NO: 31506 - DNA, 15 bp, Homo sapiens
cacattttgatatat

SEQ ID NO: 31507 - DNA, 15 bp, Homo sapiens
acattttgatatatc

SEQ ID NO: 31508 - DNA, 15 bp, Homo sapiens
cattttgatatatca

SEQ ID NO: 31509 - DNA, 15 bp, Homo sapiens
attttgatatatcaa

SEQ ID NO: 31510 - DNA, 15 bp, Homo sapiens
ttttgatatatcaag

SEQ ID NO: 31511 - DNA, 15 bp, Homo sapiens
tttgatatatcaaga

SEQ ID NO: 31512 - DNA, 15 bp, Homo sapiens
ttgatatatcaagaa

SEQ ID NO: 31513 - DNA, 15 bp, Homo sapiens
tgatatatcaagaaa

SEQ ID NO: 31514 - DNA, 15 bp, Homo sapiens
gatatatcaagaaaa

SEQ ID NO: 31515 - DNA, 15 bp, Homo sapiens
atatatcaagaaaat

SEQ ID NO: 31516 - DNA, 15 bp, Homo sapiens
tatatcaagaaaata

SEQ ID NO: 31517 - DNA, 15 bp, Homo sapiens
atatcaagaaaataa

SEQ ID NO: 31518 - DNA, 15 bp, Homo sapiens
tatcaagaaaataaa

SEQ ID NO: 31519 - DNA, 15 bp, Homo sapiens
atcaagaaaataaat

SEQ ID NO: 31520 - DNA, 15 bp, Homo sapiens
tcaagaaaataaatg

SEQ ID NO: 31521 - DNA, 15 bp, Homo sapiens
caagaaaataaatgg

SEQ ID NO: 31522 - DNA, 15 bp, Homo sapiens
aagaaaataaatgga

SEQ ID NO: 31523 - DNA, 15 bp, Homo sapiens
agaaaataaatggaa

SEQ ID NO: 31524 - DNA, 15 bp, Homo sapiens
gaaaataaatggaaa

SEQ ID NO: 31525 - DNA, 15 bp, Homo sapiens
aaaataaatggaaat

SEQ ID NO: 31526 - DNA, 15 bp, Homo sapiens
aaataaatggaaatg

SEQ ID NO: 31527 - DNA, 15 bp, Homo sapiens
aataaatggaaatgg

SEQ ID NO: 31528 - DNA, 15 bp, Homo sapiens
ataaatggaaatggg

SEQ ID NO: 31529 - DNA, 15 bp, Homo sapiens
taaatggaaatgggg

SEQ ID NO: 31530 - DNA, 15 bp, Homo sapiens
aaatggaaatggggg

SEQ ID NO: 31531 - DNA, 15 bp, Homo sapiens
aatggaaatgggggt

SEQ ID NO: 31532 - DNA, 15 bp, Homo sapiens
atggaaatgggggtg

SEQ ID NO: 31533 - DNA, 15 bp, Homo sapiens
tggaaatgggggtga

SEQ ID NO: 31534 - DNA, 15 bp, Homo sapiens
ggaaatgggggtgat

SEQ ID NO: 31535 - DNA, 15 bp, Homo sapiens
gaaatgggggtgata

SEQ ID NO: 31536 - DNA, 15 bp, Homo sapiens
aaatgggggtgataa

SEQ ID NO: 31537 - DNA, 15 bp, Homo sapiens
aatgggggtgataat

SEQ ID NO: 31538 - DNA, 15 bp, Homo sapiens
atgggggtgataatt

SEQ ID NO: 31539 - DNA, 15 bp, Homo sapiens
tgggggtgataattt

SEQ ID NO: 31540 - DNA, 15 bp, Homo sapiens
gggggtgataattta

SEQ ID NO: 31541 - DNA, 15 bp, Homo sapiens
ggggtgataatttat

SEQ ID NO: 31542 - DNA, 15 bp, Homo sapiens
gggtgataatttata

SEQ ID NO: 31543 - DNA, 15 bp, Homo sapiens
ggtgataatttatat

SEQ ID NO: 31544 - DNA, 15 bp, Homo sapiens
gtgataatttatatt

SEQ ID NO: 31545 - DNA, 15 bp, Homo sapiens
tgataatttatattt

SEQ ID NO: 31546 - DNA, 15 bp, Homo sapiens
gataatttatatttg

SEQ ID NO: 31547 - DNA, 15 bp, Homo sapiens
ataatttatatttgt

SEQ ID NO: 31548 - DNA, 15 bp, Homo sapiens
taatttatatttgta

SEQ ID NO: 31549 - DNA, 15 bp, Homo sapiens
aatttatatttgtaa

SEQ ID NO: 31550 - DNA, 15 bp, Homo sapiens
atttatatttgtaat

SEQ ID NO: 31551 - DNA, 15 bp, Homo sapiens
tttatatttgtaatt

SEQ ID NO: 31552 - DNA, 15 bp, Homo sapiens
ttatatttgtaattt

SEQ ID NO: 31553 - DNA, 15 bp, Homo sapiens
tatatttgtaattta

SEQ ID NO: 31554 - DNA, 15 bp, Homo sapiens
atatttgtaatttac

SEQ ID NO: 31555 - DNA, 15 bp, Homo sapiens
tatttgtaatttaca

SEQ ID NO: 31556 - DNA, 15 bp, Homo sapiens
atttgtaatttacaa

SEQ ID NO: 31557 - DNA, 15 bp, Homo sapiens
tttgtaatttacaaa

SEQ ID NO: 31558 - DNA, 15 bp, Homo sapiens
ttgtaatttacaaat

SEQ ID NO: 31559 - DNA, 15 bp, Homo sapiens
tgtaatttacaaatc

SEQ ID NO: 31560 - DNA, 15 bp, Homo sapiens
gtaatttacaaatca

SEQ ID NO: 31561 - DNA, 15 bp, Homo sapiens
taatttacaaatcaa

SEQ ID NO: 31562 - DNA, 15 bp, Homo sapiens
aatttacaaatcaaa

SEQ ID NO: 31563 - DNA, 15 bp, Homo sapiens
atttacaaatcaaac

SEQ ID NO: 31564 - DNA, 15 bp, Homo sapiens
tttacaaatcaaaca

SEQ ID NO: 31565 - DNA, 15 bp, Homo sapiens
ttacaaatcaaacat

SEQ ID NO: 31566 - DNA, 15 bp, Homo sapiens
tacaaatcaaacatc

SEQ ID NO: 31567 - DNA, 15 bp, Homo sapiens
acaaatcaaacatct

SEQ ID NO: 31568 - DNA, 15 bp, Homo sapiens
caaatcaaacatcta

SEQ ID NO: 31569 - DNA, 15 bp, Homo sapiens
aaatcaaacatctat

SEQ ID NO: 31570 - DNA, 15 bp, Homo sapiens
aatcaaacatctatc

SEQ ID NO: 31571 - DNA, 15 bp, Homo sapiens
atcaaacatctatca

SEQ ID NO: 31572 - DNA, 15 bp, Homo sapiens
tcaaacatctatcat

SEQ ID NO: 31573 - DNA, 15 bp, Homo sapiens
caaacatctatcata

SEQ ID NO: 31574 - DNA, 15 bp, Homo sapiens
aaacatctatcatac

SEQ ID NO: 31575 - DNA, 15 bp, Homo sapiens
aacatctatcataca

SEQ ID NO: 31576 - DNA, 15 bp, Homo sapiens
acatctatcatacac

SEQ ID NO: 31577 - DNA, 15 bp, Homo sapiens
catctatcatacact

SEQ ID NO: 31578 - DNA, 15 bp, Homo sapiens
atctatcatacactt

SEQ ID NO: 31579 - DNA, 15 bp, Homo sapiens
tctatcatacactta

SEQ ID NO: 31580 - DNA, 15 bp, Homo sapiens
ctatcatacacttac

SEQ ID NO: 31581 - DNA, 15 bp, Homo sapiens
tatcatacacttact

SEQ ID NO: 31582 - DNA, 15 bp, Homo sapiens
atcatacacttacta

SEQ ID NO: 31583 - DNA, 15 bp, Homo sapiens
tcatacacttactat

SEQ ID NO: 31584 - DNA, 15 bp, Homo sapiens
catacacttactatg

SEQ ID NO: 31585 - DNA, 15 bp, Homo sapiens
atacacttactatgt

SEQ ID NO: 31586 - DNA, 15 bp, Homo sapiens
tacacttactatgta

SEQ ID NO: 31587 - DNA, 15 bp, Homo sapiens
acacttactatgtac

SEQ ID NO: 31588 - DNA, 15 bp, Homo sapiens
cacttactatgtacc

SEQ ID NO: 31589 - DNA, 15 bp, Homo sapiens
acttactatgtacct

SEQ ID NO: 31590 - DNA, 15 bp, Homo sapiens
cttactatgtaccta

SEQ ID NO: 31591 - DNA, 15 bp, Homo sapiens
ttactatgtacctag

SEQ ID NO: 31592 - DNA, 15 bp, Homo sapiens
tactatgtacctagt

SEQ ID NO: 31593 - DNA, 15 bp, Homo sapiens
actatgtacctagtt

SEQ ID NO: 31594 - DNA, 15 bp, Homo sapiens
ctatgtacctagttt

SEQ ID NO: 31595 - DNA, 15 bp, Homo sapiens
tatgtacctagtttt

SEQ ID NO: 31596 - DNA, 15 bp, Homo sapiens
atgtacctagtttta

SEQ ID NO: 31597 - DNA, 15 bp, Homo sapiens
tgtacctagttttat

SEQ ID NO: 31598 - DNA, 15 bp, Homo sapiens
gtacctagttttatt

SEQ ID NO: 31599 - DNA, 15 bp, Homo sapiens
tacctagttttattc

SEQ ID NO: 31600 - DNA, 15 bp, Homo sapiens
acctagttttattca

SEQ ID NO: 31601 - DNA, 15 bp, Homo sapiens
cctagttttattcac

SEQ ID NO: 31602 - DNA, 15 bp, Homo sapiens
ctagttttattcacg

SEQ ID NO: 31603 - DNA, 15 bp, Homo sapiens
tagttttattcacga

SEQ ID NO: 31604 - DNA, 15 bp, Homo sapiens
agttttattcacgaa

SEQ ID NO: 31605 - DNA, 15 bp, Homo sapiens
gttttattcacgaat

SEQ ID NO: 31606 - DNA, 15 bp, Homo sapiens
ttttattcacgaatc

SEQ ID NO: 31607 - DNA, 15 bp, Homo sapiens
tttattcacgaatca

SEQ ID NO: 31608 - DNA, 15 bp, Homo sapiens
ttattcacgaatcat

SEQ ID NO: 31609 - DNA, 15 bp, Homo sapiens
tattcacgaatcatc

SEQ ID NO: 31610 - DNA, 15 bp, Homo sapiens
attcacgaatcatcc

SEQ ID NO: 31611 - DNA, 15 bp, Homo sapiens
ttcacgaatcatcca

SEQ ID NO: 31612 - DNA, 15 bp, Homo sapiens
tcacgaatcatccat

SEQ ID NO: 31613 - DNA, 15 bp, Homo sapiens
cacgaatcatccatt

SEQ ID NO: 31614 - DNA, 15 bp, Homo sapiens
acgaatcatccattt

SEQ ID NO: 31615 - DNA, 15 bp, Homo sapiens
cgaatcatccatttc

SEQ ID NO: 31616 - DNA, 15 bp, Homo sapiens
gaatcatccatttct

SEQ ID NO: 31617 - DNA, 15 bp, Homo sapiens
aatcatccatttcta

SEQ ID NO: 31618 - DNA, 15 bp, Homo sapiens
atcatccatttctaa

SEQ ID NO: 31619 - DNA, 15 bp, Homo sapiens
tcatccatttctaag

SEQ ID NO: 31620 - DNA, 15 bp, Homo sapiens
catccatttctaaga

SEQ ID NO: 31621 - DNA, 15 bp, Homo sapiens
atccatttctaagat

SEQ ID NO: 31622 - DNA, 15 bp, Homo sapiens
tccatttctaagata

SEQ ID NO: 31623 - DNA, 15 bp, Homo sapiens
ccatttctaagataa

SEQ ID NO: 31624 - DNA, 15 bp, Homo sapiens
catttctaagataaa

SEQ ID NO: 31625 - DNA, 15 bp, Homo sapiens
atttctaagataaaa

SEQ ID NO: 31626 - DNA, 15 bp, Homo sapiens
tttctaagataaaaa

SEQ ID NO: 31627 - DNA, 15 bp, Homo sapiens
ttctaagataaaaat

SEQ ID NO: 31628 - DNA, 15 bp, Homo sapiens
tctaagataaaaatt

SEQ ID NO: 31629 - DNA, 15 bp, Homo sapiens
ctaagataaaaattc

SEQ ID NO: 31630 - DNA, 15 bp, Homo sapiens
taagataaaaattcc

SEQ ID NO: 31631 - DNA, 15 bp, Homo sapiens
aagataaaaattccc

SEQ ID NO: 31632 - DNA, 15 bp, Homo sapiens
agataaaaattccca

SEQ ID NO: 31633 - DNA, 15 bp, Homo sapiens
gataaaaattcccat

SEQ ID NO: 31634 - DNA, 15 bp, Homo sapiens
ataaaaattcccatc

SEQ ID NO: 31635 - DNA, 15 bp, Homo sapiens
taaaaattcccatca

SEQ ID NO: 31636 - DNA, 15 bp, Homo sapiens
aaaaattcccatcat

SEQ ID NO: 31637 - DNA, 15 bp, Homo sapiens
aaaattcccatcatt

SEQ ID NO: 31638 - DNA, 15 bp, Homo sapiens
aaattcccatcattt

SEQ ID NO: 31639 - DNA, 15 bp, Homo sapiens
aattcccatcatttc

SEQ ID NO: 31640 - DNA, 15 bp, Homo sapiens
attcccatcatttcc

SEQ ID NO: 31641 - DNA, 15 bp, Homo sapiens
ttcccatcatttcct

SEQ ID NO: 31642 - DNA, 15 bp, Homo sapiens
tcccatcatttcctc

SEQ ID NO: 31643 - DNA, 15 bp, Homo sapiens
cccatcatttcctca

SEQ ID NO: 31644 - DNA, 15 bp, Homo sapiens
ccatcatttcctcac

SEQ ID NO: 31645 - DNA, 15 bp, Homo sapiens
catcatttcctcact

SEQ ID NO: 31646 - DNA, 15 bp, Homo sapiens
atcatttcctcactg

SEQ ID NO: 31647 - DNA, 15 bp, Homo sapiens
tcatttcctcactgc

SEQ ID NO: 31648 - DNA, 15 bp, Homo sapiens
catttcctcactgca

SEQ ID NO: 31649 - DNA, 15 bp, Homo sapiens
atttcctcactgcac

SEQ ID NO: 31650 - DNA, 15 bp, Homo sapiens
tttcctcactgcact

SEQ ID NO: 31651 - DNA, 15 bp, Homo sapiens
ttcctcactgcacta

SEQ ID NO: 31652 - DNA, 15 bp, Homo sapiens
tcctcactgcactaa

SEQ ID NO: 31653 - DNA, 15 bp, Homo sapiens
cctcactgcactaaa

SEQ ID NO: 31654 - DNA, 15 bp, Homo sapiens
ctcactgcactaaac

SEQ ID NO: 31655 - DNA, 15 bp, Homo sapiens
tcactgcactaaacc

SEQ ID NO: 31656 - DNA, 15 bp, Homo sapiens
cactgcactaaacca

SEQ ID NO: 31657 - DNA, 15 bp, Homo sapiens
actgcactaaaccac

SEQ ID NO: 31658 - DNA, 15 bp, Homo sapiens
ctgcactaaaccacc

SEQ ID NO: 31659 - DNA, 15 bp, Homo sapiens
tgcactaaaccacca

SEQ ID NO: 31660 - DNA, 15 bp, Homo sapiens
gcactaaaccaccac

SEQ ID NO: 31661 - DNA, 15 bp, Homo sapiens
cactaaaccaccact

SEQ ID NO: 31662 - DNA, 15 bp, Homo sapiens
actaaaccaccactg

SEQ ID NO: 31663 - DNA, 15 bp, Homo sapiens
ctaaaccaccactgt

SEQ ID NO: 31664 - DNA, 15 bp, Homo sapiens
taaaccaccactgta

SEQ ID NO: 31665 - DNA, 15 bp, Homo sapiens
aaaccaccactgtac

SEQ ID NO: 31666 - DNA, 15 bp, Homo sapiens
aaccaccactgtaca

SEQ ID NO: 31667 - DNA, 15 bp, Homo sapiens
accaccactgtacat

SEQ ID NO: 31668 - DNA, 15 bp, Homo sapiens
ccaccactgtacatc

SEQ ID NO: 31669 - DNA, 15 bp, Homo sapiens
caccactgtacatct

SEQ ID NO: 31670 - DNA, 15 bp, Homo sapiens
accactgtacatctt

SEQ ID NO: 31671 - DNA, 15 bp, Homo sapiens
ccactgtacatcttt

SEQ ID NO: 31672 - DNA, 15 bp, Homo sapiens
cactgtacatctttg

SEQ ID NO: 31673 - DNA, 15 bp, Homo sapiens
actgtacatctttgc

SEQ ID NO: 31674 - DNA, 15 bp, Homo sapiens
ctgtacatctttgcc

SEQ ID NO: 31675 - DNA, 15 bp, Homo sapiens
tgtacatctttgcca

SEQ ID NO: 31676 - DNA, 15 bp, Homo sapiens
gtacatctttgccaa

SEQ ID NO: 31677 - DNA, 15 bp, Homo sapiens
tacatctttgccaat

SEQ ID NO: 31678 - DNA, 15 bp, Homo sapiens
acatctttgccaatg

SEQ ID NO: 31679 - DNA, 15 bp, Homo sapiens
catctttgccaatga

SEQ ID NO: 31680 - DNA, 15 bp, Homo sapiens
atctttgccaatgaa

SEQ ID NO: 31681 - DNA, 15 bp, Homo sapiens
tctttgccaatgaat

SEQ ID NO: 31682 - DNA, 15 bp, Homo sapiens
ctttgccaatgaatg

SEQ ID NO: 31683 - DNA, 15 bp, Homo sapiens
tttgccaatgaatga

SEQ ID NO: 31684 - DNA, 15 bp, Homo sapiens
ttgccaatgaatgac

SEQ ID NO: 31685 - DNA, 15 bp, Homo sapiens
tgccaatgaatgact

SEQ ID NO: 31686 - DNA, 15 bp, Homo sapiens
gccaatgaatgactg

SEQ ID NO: 31687 - DNA, 15 bp, Homo sapiens
ccaatgaatgactgt

SEQ ID NO: 31688 - DNA, 15 bp, Homo sapiens
caatgaatgactgta

SEQ ID NO: 31689 - DNA, 15 bp, Homo sapiens
aatgaatgactgtat

SEQ ID NO: 31690 - DNA, 15 bp, Homo sapiens
atgaatgactgtatt

SEQ ID NO: 31691 - DNA, 15 bp, Homo sapiens
tgaatgactgtattt

SEQ ID NO: 31692 - DNA, 15 bp, Homo sapiens
gaatgactgtatttt

SEQ ID NO: 31693 - DNA, 15 bp, Homo sapiens
aatgactgtattttt

SEQ ID NO: 31694 - DNA, 15 bp, Homo sapiens
atgactgtatttttc

SEQ ID NO: 31695 - DNA, 15 bp, Homo sapiens
tgactgtatttttct

SEQ ID NO: 31696 - DNA, 15 bp, Homo sapiens
gactgtatttttcta

SEQ ID NO: 31697 - DNA, 15 bp, Homo sapiens
actgtatttttctat

SEQ ID NO: 31698 - DNA, 15 bp, Homo sapiens
ctgtatttttctatg

SEQ ID NO: 31699 - DNA, 15 bp, Homo sapiens
tgtatttttctatgg

SEQ ID NO: 31700 - DNA, 15 bp, Homo sapiens
gtatttttctatggt

SEQ ID NO: 31701 - DNA, 15 bp, Homo sapiens
tatttttctatggtc

SEQ ID NO: 31702 - DNA, 15 bp, Homo sapiens
atttttctatggtca

SEQ ID NO: 31703 - DNA, 15 bp, Homo sapiens
tttttctatggtcaa

SEQ ID NO: 31704 - DNA, 15 bp, Homo sapiens
ttttctatggtcaag

SEQ ID NO: 31705 - DNA, 15 bp, Homo sapiens
tttctatggtcaaga

SEQ ID NO: 31706 - DNA, 15 bp, Homo sapiens
ttctatggtcaagat

SEQ ID NO: 31707 - DNA, 15 bp, Homo sapiens
tctatggtcaagatt

SEQ ID NO: 31708 - DNA, 15 bp, Homo sapiens
ctatggtcaagattt

SEQ ID NO: 31709 - DNA, 15 bp, Homo sapiens
tatggtcaagattta

SEQ ID NO: 31710 - DNA, 15 bp, Homo sapiens
atggtcaagatttaa

SEQ ID NO: 31711 - DNA, 15 bp, Homo sapiens
tggtcaagatttaaa

SEQ ID NO: 31712 - DNA, 15 bp, Homo sapiens
ggtcaagatttaaaa

SEQ ID NO: 31713 - DNA, 15 bp, Homo sapiens
gtcaagatttaaaat

SEQ ID NO: 31714 - DNA, 15 bp, Homo sapiens
tcaagatttaaaatt

SEQ ID NO: 31715 - DNA, 15 bp, Homo sapiens
caagatttaaaattc

SEQ ID NO: 31716 - DNA, 15 bp, Homo sapiens
aagatttaaaattct

SEQ ID NO: 31717 - DNA, 15 bp, Homo sapiens
agatttaaaattctg

SEQ ID NO: 31718 - DNA, 15 bp, Homo sapiens
gatttaaaattctgg

SEQ ID NO: 31719 - DNA, 15 bp, Homo sapiens
atttaaaattctggg

SEQ ID NO: 31720 - DNA, 15 bp, Homo sapiens
tttaaaattctggga

SEQ ID NO: 31721 - DNA, 15 bp, Homo sapiens
ttaaaattctgggat

SEQ ID NO: 31722 - DNA, 15 bp, Homo sapiens
taaaattctgggata

SEQ ID NO: 31723 - DNA, 15 bp, Homo sapiens
aaaattctgggatac

SEQ ID NO: 31724 - DNA, 15 bp, Homo sapiens
aaattctgggataca

SEQ ID NO: 31725 - DNA, 15 bp, Homo sapiens
aattctgggatacat

SEQ ID NO: 31726 - DNA, 15 bp, Homo sapiens
attctgggatacatt

SEQ ID NO: 31727 - DNA, 15 bp, Homo sapiens
ttctgggatacatta

SEQ ID NO: 31728 - DNA, 15 bp, Homo sapiens
tctgggatacattat

SEQ ID NO: 31729 - DNA, 15 bp, Homo sapiens
ctgggatacattatg

SEQ ID NO: 31730 - DNA, 15 bp, Homo sapiens
tgggatacattatga

SEQ ID NO: 31731 - DNA, 15 bp, Homo sapiens
gggatacattatgaa

SEQ ID NO: 31732 - DNA, 15 bp, Homo sapiens
ggatacattatgaaa

SEQ ID NO: 31733 - DNA, 15 bp, Homo sapiens
gatacattatgaaaa

SEQ ID NO: 31734 - DNA, 15 bp, Homo sapiens
atacattatgaaaac

SEQ ID NO: 31735 - DNA, 15 bp, Homo sapiens
tacattatgaaaact

SEQ ID NO: 31736 - DNA, 15 bp, Homo sapiens
acattatgaaaactg

SEQ ID NO: 31737 - DNA, 15 bp, Homo sapiens
cattatgaaaactgc

SEQ ID NO: 31738 - DNA, 15 bp, Homo sapiens
attatgaaaactgca

SEQ ID NO: 31739 - DNA, 15 bp, Homo sapiens
ttatgaaaactgcat

SEQ ID NO: 31740 - DNA, 15 bp, Homo sapiens
tatgaaaactgcatt

SEQ ID NO: 31741 - DNA, 15 bp, Homo sapiens
atgaaaactgcatta

SEQ ID NO: 31742 - DNA, 15 bp, Homo sapiens
tgaaaactgcattaa

SEQ ID NO: 31743 - DNA, 15 bp, Homo sapiens
gaaaactgcattaat

SEQ ID NO: 31744 - DNA, 15 bp, Homo sapiens
aaaactgcattaatg

SEQ ID NO: 31745 - DNA, 15 bp, Homo sapiens
aaactgcattaatga

SEQ ID NO: 31746 - DNA, 15 bp, Homo sapiens
aactgcattaatgaa

SEQ ID NO: 31747 - DNA, 15 bp, Homo sapiens
actgcattaatgaaa

SEQ ID NO: 31748 - DNA, 15 bp, Homo sapiens
ctgcattaatgaaaa

SEQ ID NO: 31749 - DNA, 15 bp, Homo sapiens
tgcattaatgaaaac

SEQ ID NO: 31750 - DNA, 15 bp, Homo sapiens
gcattaatgaaaaca

SEQ ID NO: 31751 - DNA, 15 bp, Homo sapiens
cattaatgaaaacaa

SEQ ID NO: 31752 - DNA, 15 bp, Homo sapiens
attaatgaaaacaac

SEQ ID NO: 31753 - DNA, 15 bp, Homo sapiens
ttaatgaaaacaacc

SEQ ID NO: 31754 - DNA, 15 bp, Homo sapiens
taatgaaaacaacct

SEQ ID NO: 31755 - DNA, 15 bp, Homo sapiens
aatgaaaacaaccta

SEQ ID NO: 31756 - DNA, 15 bp, Homo sapiens
atgaaaacaacctac

SEQ ID NO: 31757 - DNA, 15 bp, Homo sapiens
tgaaaacaacctact

SEQ ID NO: 31758 - DNA, 15 bp, Homo sapiens
gaaaacaacctactg

SEQ ID NO: 31759 - DNA, 15 bp, Homo sapiens
aaaacaacctactgc

SEQ ID NO: 31760 - DNA, 15 bp, Homo sapiens
aaacaacctactgct

SEQ ID NO: 31761 - DNA, 15 bp, Homo sapiens
aacaacctactgcta

SEQ ID NO: 31762 - DNA, 15 bp, Homo sapiens
acaacctactgctat

SEQ ID NO: 31763 - DNA, 15 bp, Homo sapiens
caacctactgctatt

SEQ ID NO: 31764 - DNA, 15 bp, Homo sapiens
aacctactgctattc

SEQ ID NO: 31765 - DNA, 15 bp, Homo sapiens
acctactgctattca

SEQ ID NO: 31766 - DNA, 15 bp, Homo sapiens
cctactgctattcat

SEQ ID NO: 31767 - DNA, 15 bp, Homo sapiens
ctactgctattcatg

SEQ ID NO: 31768 - DNA, 15 bp, Homo sapiens
tactgctattcatgc

SEQ ID NO: 31769 - DNA, 15 bp, Homo sapiens
actgctattcatgct

SEQ ID NO: 31770 - DNA, 15 bp, Homo sapiens
ctgctattcatgctc

SEQ ID NO: 31771 - DNA, 15 bp, Homo sapiens
tgctattcatgctca

SEQ ID NO: 31772 - DNA, 15 bp, Homo sapiens
gctattcatgctcaa

SEQ ID NO: 31773 - DNA, 15 bp, Homo sapiens
ctattcatgctcaac

SEQ ID NO: 31774 - DNA, 15 bp, Homo sapiens
tattcatgctcaaca

SEQ ID NO: 31775 - DNA, 15 bp, Homo sapiens
attcatgctcaacag

SEQ ID NO: 31776 - DNA, 15 bp, Homo sapiens
ttcatgctcaacagt

SEQ ID NO: 31777 - DNA, 15 bp, Homo sapiens
tcatgctcaacagta

SEQ ID NO: 31778 - DNA, 15 bp, Homo sapiens
catgctcaacagtag

SEQ ID NO: 31779 - DNA, 15 bp, Homo sapiens
atgctcaacagtagc

SEQ ID NO: 31780 - DNA, 15 bp, Homo sapiens
tgctcaacagtagca

SEQ ID NO: 31781 - DNA, 15 bp, Homo sapiens
gctcaacagtagcaa

SEQ ID NO: 31782 - DNA, 15 bp, Homo sapiens
ctcaacagtagcaag

SEQ ID NO: 31783 - DNA, 15 bp, Homo sapiens
tcaacagtagcaagc

SEQ ID NO: 31784 - DNA, 15 bp, Homo sapiens
caacagtagcaagct

SEQ ID NO: 31785 - DNA, 15 bp, Homo sapiens
aacagtagcaagcta

SEQ ID NO: 31786 - DNA, 15 bp, Homo sapiens
acagtagcaagctaa

SEQ ID NO: 31787 - DNA, 15 bp, Homo sapiens
cagtagcaagctaaa

SEQ ID NO: 31788 - DNA, 15 bp, Homo sapiens
agtagcaagctaaac

SEQ ID NO: 31789 - DNA, 15 bp, Homo sapiens
gtagcaagctaaact

SEQ ID NO: 31790 - DNA, 15 bp, Homo sapiens
tagcaagctaaacta

SEQ ID NO: 31791 - DNA, 15 bp, Homo sapiens
agcaagctaaactac

SEQ ID NO: 31792 - DNA, 15 bp, Homo sapiens
gcaagctaaactact

SEQ ID NO: 31793 - DNA, 15 bp, Homo sapiens
caagctaaactactg

SEQ ID NO: 31794 - DNA, 15 bp, Homo sapiens
aagctaaactactgt

SEQ ID NO: 31795 - DNA, 15 bp, Homo sapiens
agctaaactactgta

SEQ ID NO: 31796 - DNA, 15 bp, Homo sapiens
gctaaactactgtac

SEQ ID NO: 31797 - DNA, 15 bp, Homo sapiens
ctaaactactgtact

SEQ ID NO: 31798 - DNA, 15 bp, Homo sapiens
taaactactgtactt

SEQ ID NO: 31799 - DNA, 15 bp, Homo sapiens
aaactactgtacttg

SEQ ID NO: 31800 - DNA, 15 bp, Homo sapiens
aactactgtacttgg

SEQ ID NO: 31801 - DNA, 15 bp, Homo sapiens
actactgtacttggc

SEQ ID NO: 31802 - DNA, 15 bp, Homo sapiens
ctactgtacttggct

SEQ ID NO: 31803 - DNA, 15 bp, Homo sapiens
tactgtacttggctc

SEQ ID NO: 31804 - DNA, 15 bp, Homo sapiens
actgtacttggctcc

SEQ ID NO: 31805 - DNA, 15 bp, Homo sapiens
ctgtacttggctcct

SEQ ID NO: 31806 - DNA, 15 bp, Homo sapiens
tgtacttggctcctt

SEQ ID NO: 31807 - DNA, 15 bp, Homo sapiens
gtacttggctccttt

SEQ ID NO: 31808 - DNA, 15 bp, Homo sapiens
tacttggctcctttg

SEQ ID NO: 31809 - DNA, 15 bp, Homo sapiens
acttggctcctttga

SEQ ID NO: 31810 - DNA, 15 bp, Homo sapiens
cttggctcctttgag

SEQ ID NO: 31811 - DNA, 15 bp, Homo sapiens
ttggctcctttgagc

SEQ ID NO: 31812 - DNA, 15 bp, Homo sapiens
tggctcctttgagct

SEQ ID NO: 31813 - DNA, 15 bp, Homo sapiens
ggctcctttgagcta

SEQ ID NO: 31814 - DNA, 15 bp, Homo sapiens
gctcctttgagctac

SEQ ID NO: 31815 - DNA, 15 bp, Homo sapiens
ctcctttgagctacc

SEQ ID NO: 31816 - DNA, 15 bp, Homo sapiens
tcctttgagctaccc

SEQ ID NO: 31817 - DNA, 15 bp, Homo sapiens
cctttgagctaccct

SEQ ID NO: 31818 - DNA, 15 bp, Homo sapiens
ctttgagctaccctt

SEQ ID NO: 31819 - DNA, 15 bp, Homo sapiens
tttgagctaccctta

SEQ ID NO: 31820 - DNA, 15 bp, Homo sapiens
ttgagctacccttat

SEQ ID NO: 31821 - DNA, 15 bp, Homo sapiens
tgagctacccttatt

SEQ ID NO: 31822 - DNA, 15 bp, Homo sapiens
gagctacccttattt

SEQ ID NO: 31823 - DNA, 15 bp, Homo sapiens
agctacccttatttt

SEQ ID NO: 31824 - DNA, 15 bp, Homo sapiens
gctacccttatttta

SEQ ID NO: 31825 - DNA, 15 bp, Homo sapiens
ctacccttattttaa

SEQ ID NO: 31826 - DNA, 15 bp, Homo sapiens
tacccttattttaag

SEQ ID NO: 31827 - DNA, 15 bp, Homo sapiens
acccttattttaaga

SEQ ID NO: 31828 - DNA, 15 bp, Homo sapiens
cccttattttaagaa

SEQ ID NO: 31829 - DNA, 15 bp, Homo sapiens
ccttattttaagaat

SEQ ID NO: 31830 - DNA, 15 bp, Homo sapiens
cttattttaagaatt

SEQ ID NO: 31831 - DNA, 15 bp, Homo sapiens
ttattttaagaatta

SEQ ID NO: 31832 - DNA, 15 bp, Homo sapiens
tattttaagaattat

SEQ ID NO: 31833 - DNA, 15 bp, Homo sapiens
attttaagaattata

SEQ ID NO: 31834 - DNA, 15 bp, Homo sapiens
ttttaagaattataa

SEQ ID NO: 31835 - DNA, 15 bp, Homo sapiens
tttaagaattataaa

SEQ ID NO: 31836 - DNA, 15 bp, Homo sapiens
ttaagaattataaat

SEQ ID NO: 31837 - DNA, 15 bp, Homo sapiens
taagaattataaata

SEQ ID NO: 31838 - DNA, 15 bp, Homo sapiens
aagaattataaatag

SEQ ID NO: 31839 - DNA, 15 bp, Homo sapiens
agaattataaatagg

SEQ ID NO: 31840 - DNA, 15 bp, Homo sapiens
gaattataaataggt

SEQ ID NO: 31841 - DNA, 15 bp, Homo sapiens
aattataaataggtg

SEQ ID NO: 31842 - DNA, 15 bp, Homo sapiens
attataaataggtgt

SEQ ID NO: 31843 - DNA, 15 bp, Homo sapiens
ttataaataggtgtc

SEQ ID NO: 31844 - DNA, 15 bp, Homo sapiens
tataaataggtgtca

SEQ ID NO: 31845 - DNA, 15 bp, Homo sapiens
ataaataggtgtcaa

SEQ ID NO: 31846 - DNA, 15 bp, Homo sapiens
taaataggtgtcaac

SEQ ID NO: 31847 - DNA, 15 bp, Homo sapiens
aaataggtgtcaacc

SEQ ID NO: 31848 - DNA, 15 bp, Homo sapiens
aataggtgtcaaccc

SEQ ID NO: 31849 - DNA, 15 bp, Homo sapiens
ataggtgtcaaccca

SEQ ID NO: 31850 - DNA, 15 bp, Homo sapiens
taggtgtcaacccac

SEQ ID NO: 31851 - DNA, 15 bp, Homo sapiens
aggtgtcaacccaca

SEQ ID NO: 31852 - DNA, 15 bp, Homo sapiens
ggtgtcaacccacac

SEQ ID NO: 31853 - DNA, 15 bp, Homo sapiens
gtgtcaacccacaca

SEQ ID NO: 31854 - DNA, 15 bp, Homo sapiens
tgtcaacccacacaa

SEQ ID NO: 31855 - DNA, 15 bp, Homo sapiens
gtcaacccacacaaa

SEQ ID NO: 31856 - DNA, 15 bp, Homo sapiens
tcaacccacacaaag

SEQ ID NO: 31857 - DNA, 15 bp, Homo sapiens
caacccacacaaaga

SEQ ID NO: 31858 - DNA, 15 bp, Homo sapiens
aacccacacaaagaa

SEQ ID NO: 31859 - DNA, 15 bp, Homo sapiens
acccacacaaagaac

SEQ ID NO: 31860 - DNA, 15 bp, Homo sapiens
cccacacaaagaaca

SEQ ID NO: 31861 - DNA, 15 bp, Homo sapiens
ccacacaaagaacag

SEQ ID NO: 31862 - DNA, 15 bp, Homo sapiens
cacacaaagaacaga

SEQ ID NO: 31863 - DNA, 15 bp, Homo sapiens
acacaaagaacagat

SEQ ID NO: 31864 - DNA, 15 bp, Homo sapiens
cacaaagaacagatt

SEQ ID NO: 31865 - DNA, 15 bp, Homo sapiens
acaaagaacagattg

SEQ ID NO: 31866 - DNA, 15 bp, Homo sapiens
caaagaacagattgt

SEQ ID NO: 31867 - DNA, 15 bp, Homo sapiens
aaagaacagattgtg

SEQ ID NO: 31868 - DNA, 15 bp, Homo sapiens
aagaacagattgtgg

SEQ ID NO: 31869 - DNA, 15 bp, Homo sapiens
agaacagattgtgga

SEQ ID NO: 31870 - DNA, 15 bp, Homo sapiens
gaacagattgtggat

SEQ ID NO: 31871 - DNA, 15 bp, Homo sapiens
aacagattgtggatt

SEQ ID NO: 31872 - DNA, 15 bp, Homo sapiens
acagattgtggatta

SEQ ID NO: 31873 - DNA, 15 bp, Homo sapiens
cagattgtggattac

SEQ ID NO: 31874 - DNA, 15 bp, Homo sapiens
agattgtggattacc

SEQ ID NO: 31875 - DNA, 15 bp, Homo sapiens
gattgtggattaccg

SEQ ID NO: 31876 - DNA, 15 bp, Homo sapiens
attgtggattaccgt

SEQ ID NO: 31877 - DNA, 15 bp, Homo sapiens
ttgtggattaccgta

SEQ ID NO: 31878 - DNA, 15 bp, Homo sapiens
tgtggattaccgtag

SEQ ID NO: 31879 - DNA, 15 bp, Homo sapiens
gtggattaccgtagg

SEQ ID NO: 31880 - DNA, 15 bp, Homo sapiens
tggattaccgtaggg

SEQ ID NO: 31881 - DNA, 15 bp, Homo sapiens
ggattaccgtaggga

SEQ ID NO: 31882 - DNA, 15 bp, Homo sapiens
gattaccgtagggaa

SEQ ID NO: 31883 - DNA, 15 bp, Homo sapiens
attaccgtagggaaa

SEQ ID NO: 31884 - DNA, 15 bp, Homo sapiens
ttaccgtagggaaaa

SEQ ID NO: 31885 - DNA, 15 bp, Homo sapiens
taccgtagggaaaaa

SEQ ID NO: 31886 - DNA, 15 bp, Homo sapiens
accgtagggaaaaaa

SEQ ID NO: 31887 - DNA, 15 bp, Homo sapiens
ccgtagggaaaaaaa

SEQ ID NO: 31888 - DNA, 15 bp, Homo sapiens
cgtagggaaaaaaat

SEQ ID NO: 31889 - DNA, 15 bp, Homo sapiens
gtagggaaaaaaata

SEQ ID NO: 31890 - DNA, 15 bp, Homo sapiens
tagggaaaaaaatag

SEQ ID NO: 31891 - DNA, 15 bp, Homo sapiens
agggaaaaaaatagc

SEQ ID NO: 31892 - DNA, 15 bp, Homo sapiens
gggaaaaaaatagct

SEQ ID NO: 31893 - DNA, 15 bp, Homo sapiens
ggaaaaaaatagctt

SEQ ID NO: 31894 - DNA, 15 bp, Homo sapiens
gaaaaaaatagctta

SEQ ID NO: 31895 - DNA, 15 bp, Homo sapiens
aaaaaaatagcttac

SEQ ID NO: 31896 - DNA, 15 bp, Homo sapiens
aaaaaatagcttact

SEQ ID NO: 31897 - DNA, 15 bp, Homo sapiens
aaaaatagcttactc

SEQ ID NO: 31898 - DNA, 15 bp, Homo sapiens
aaaatagcttactca

SEQ ID NO: 31899 - DNA, 15 bp, Homo sapiens
aaatagcttactcaa

SEQ ID NO: 31900 - DNA, 15 bp, Homo sapiens
aatagcttactcaac

SEQ ID NO: 31901 - DNA, 15 bp, Homo sapiens
atagcttactcaact

SEQ ID NO: 31902 - DNA, 15 bp, Homo sapiens
tagcttactcaactt

SEQ ID NO: 31903 - DNA, 15 bp, Homo sapiens
agcttactcaactta

SEQ ID NO: 31904 - DNA, 15 bp, Homo sapiens
gcttactcaacttac

SEQ ID NO: 31905 - DNA, 15 bp, Homo sapiens
cttactcaacttact

SEQ ID NO: 31906 - DNA, 15 bp, Homo sapiens
ttactcaacttacta

SEQ ID NO: 31907 - DNA, 15 bp, Homo sapiens
tactcaacttactaa

SEQ ID NO: 31908 - DNA, 15 bp, Homo sapiens
actcaacttactaaa

SEQ ID NO: 31909 - DNA, 15 bp, Homo sapiens
ctcaacttactaaaa

SEQ ID NO: 31910 - DNA, 15 bp, Homo sapiens
tcaacttactaaaag

SEQ ID NO: 31911 - DNA, 15 bp, Homo sapiens
caacttactaaaagt

SEQ ID NO: 31912 - DNA, 15 bp, Homo sapiens
aacttactaaaagtt

SEQ ID NO: 31913 - DNA, 15 bp, Homo sapiens
acttactaaaagttt

SEQ ID NO: 31914 - DNA, 15 bp, Homo sapiens
cttactaaaagtttc

SEQ ID NO: 31915 - DNA, 15 bp, Homo sapiens
ttactaaaagtttca

SEQ ID NO: 31916 - DNA, 15 bp, Homo sapiens
tactaaaagtttcaa

SEQ ID NO: 31917 - DNA, 15 bp, Homo sapiens
actaaaagtttcaac

SEQ ID NO: 31918 - DNA, 15 bp, Homo sapiens
ctaaaagtttcaaca

SEQ ID NO: 31919 - DNA, 15 bp, Homo sapiens
taaaagtttcaacac

SEQ ID NO: 31920 - DNA, 15 bp, Homo sapiens
aaaagtttcaacacc

SEQ ID NO: 31921 - DNA, 15 bp, Homo sapiens
aaagtttcaacacca

SEQ ID NO: 31922 - DNA, 15 bp, Homo sapiens
aagtttcaacaccaa

SEQ ID NO: 31923 - DNA, 15 bp, Homo sapiens
agtttcaacaccaaa

SEQ ID NO: 31924 - DNA, 15 bp, Homo sapiens
gtttcaacaccaaaa

SEQ ID NO: 31925 - DNA, 15 bp, Homo sapiens
tttcaacaccaaaaa

SEQ ID NO: 31926 - DNA, 15 bp, Homo sapiens
ttcaacaccaaaaaa

SEQ ID NO: 31927 - DNA, 15 bp, Homo sapiens
tcaacaccaaaaaag

SEQ ID NO: 31928 - DNA, 15 bp, Homo sapiens
caacaccaaaaaaga

SEQ ID NO: 31929 - DNA, 15 bp, Homo sapiens
aacaccaaaaaagat

SEQ ID NO: 31930 - DNA, 15 bp, Homo sapiens
acaccaaaaaagatt

SEQ ID NO: 31931 - DNA, 15 bp, Homo sapiens
caccaaaaaagattt

SEQ ID NO: 31932 - DNA, 15 bp, Homo sapiens
accaaaaaagattta

SEQ ID NO: 31933 - DNA, 15 bp, Homo sapiens
ccaaaaaagatttaa

SEQ ID NO: 31934 - DNA, 15 bp, Homo sapiens
caaaaaagatttaac

SEQ ID NO: 31935 - DNA, 15 bp, Homo sapiens
aaaaaagatttaact

SEQ ID NO: 31936 - DNA, 15 bp, Homo sapiens
aaaaagatttaactt

SEQ ID NO: 31937 - DNA, 15 bp, Homo sapiens
aaaagatttaacttg

SEQ ID NO: 31938 - DNA, 15 bp, Homo sapiens
aaagatttaacttgg

SEQ ID NO: 31939 - DNA, 15 bp, Homo sapiens
aagatttaacttggc

SEQ ID NO: 31940 - DNA, 15 bp, Homo sapiens
agatttaacttggct

SEQ ID NO: 31941 - DNA, 15 bp, Homo sapiens
gatttaacttggctg

SEQ ID NO: 31942 - DNA, 15 bp, Homo sapiens
atttaacttggctga

SEQ ID NO: 31943 - DNA, 15 bp, Homo sapiens
tttaacttggctgaa

SEQ ID NO: 31944 - DNA, 15 bp, Homo sapiens
ttaacttggctgaaa

SEQ ID NO: 31945 - DNA, 15 bp, Homo sapiens
taacttggctgaaag

SEQ ID NO: 31946 - DNA, 15 bp, Homo sapiens
aacttggctgaaagt

SEQ ID NO: 31947 - DNA, 15 bp, Homo sapiens
acttggctgaaagtt

SEQ ID NO: 31948 - DNA, 15 bp, Homo sapiens
cttggctgaaagttc

SEQ ID NO: 31949 - DNA, 15 bp, Homo sapiens
ttggctgaaagttct

SEQ ID NO: 31950 - DNA, 15 bp, Homo sapiens
tggctgaaagttctg

SEQ ID NO: 31951 - DNA, 15 bp, Homo sapiens
ggctgaaagttctga

SEQ ID NO: 31952 - DNA, 15 bp, Homo sapiens
gctgaaagttctgaa

SEQ ID NO: 31953 - DNA, 15 bp, Homo sapiens
ctgaaagttctgaaa

SEQ ID NO: 31954 - DNA, 15 bp, Homo sapiens
tgaaagttctgaaac

SEQ ID NO: 31955 - DNA, 15 bp, Homo sapiens
gaaagttctgaaaca

SEQ ID NO: 31956 - DNA, 15 bp, Homo sapiens
aaagttctgaaacag

SEQ ID NO: 31957 - DNA, 15 bp, Homo sapiens
aagttctgaaacagc

SEQ ID NO: 31958 - DNA, 15 bp, Homo sapiens
agttctgaaacagct

SEQ ID NO: 31959 - DNA, 15 bp, Homo sapiens
gttctgaaacagctg

SEQ ID NO: 31960 - DNA, 15 bp, Homo sapiens
ttctgaaacagctga

SEQ ID NO: 31961 - DNA, 15 bp, Homo sapiens
tctgaaacagctgag

SEQ ID NO: 31962 - DNA, 15 bp, Homo sapiens
ctgaaacagctgaga

SEQ ID NO: 31963 - DNA, 15 bp, Homo sapiens
tgaaacagctgagac

SEQ ID NO: 31964 - DNA, 15 bp, Homo sapiens
gaaacagctgagaca

SEQ ID NO: 31965 - DNA, 15 bp, Homo sapiens
aaacagctgagacac

SEQ ID NO: 31966 - DNA, 15 bp, Homo sapiens
aacagctgagacaca

SEQ ID NO: 31967 - DNA, 15 bp, Homo sapiens
acagctgagacacag

SEQ ID NO: 31968 - DNA, 15 bp, Homo sapiens
cagctgagacacaga

SEQ ID NO: 31969 - DNA, 15 bp, Homo sapiens
agctgagacacagaa

SEQ ID NO: 31970 - DNA, 15 bp, Homo sapiens
gctgagacacagaac

SEQ ID NO: 31971 - DNA, 15 bp, Homo sapiens
ctgagacacagaacc

SEQ ID NO: 31972 - DNA, 15 bp, Homo sapiens
tgagacacagaacca

SEQ ID NO: 31973 - DNA, 15 bp, Homo sapiens
gagacacagaaccag

SEQ ID NO: 31974 - DNA, 15 bp, Homo sapiens
agacacagaaccagg

SEQ ID NO: 31975 - DNA, 15 bp, Homo sapiens
gacacagaaccagga

SEQ ID NO: 31976 - DNA, 15 bp, Homo sapiens
acacagaaccaggaa

SEQ ID NO: 31977 - DNA, 15 bp, Homo sapiens
cacagaaccaggaag

SEQ ID NO: 31978 - DNA, 15 bp, Homo sapiens
acagaaccaggaagc

SEQ ID NO: 31979 - DNA, 15 bp, Homo sapiens
cagaaccaggaagct

SEQ ID NO: 31980 - DNA, 15 bp, Homo sapiens
agaaccaggaagcta

SEQ ID NO: 31981 - DNA, 15 bp, Homo sapiens
gaaccaggaagctat

SEQ ID NO: 31982 - DNA, 15 bp, Homo sapiens
aaccaggaagctata

SEQ ID NO: 31983 - DNA, 15 bp, Homo sapiens
accaggaagctataa

SEQ ID NO: 31984 - DNA, 15 bp, Homo sapiens
ccaggaagctataat

SEQ ID NO: 31985 - DNA, 15 bp, Homo sapiens
caggaagctataatt

SEQ ID NO: 31986 - DNA, 15 bp, Homo sapiens
aggaagctataattt

SEQ ID NO: 31987 - DNA, 15 bp, Homo sapiens
ggaagctataattta

SEQ ID NO: 31988 - DNA, 15 bp, Homo sapiens
gaagctataatttat

SEQ ID NO: 31989 - DNA, 15 bp, Homo sapiens
aagctataatttata

SEQ ID NO: 31990 - DNA, 15 bp, Homo sapiens
agctataatttataa

SEQ ID NO: 31991 - DNA, 15 bp, Homo sapiens
gctataatttataat

SEQ ID NO: 31992 - DNA, 15 bp, Homo sapiens
ctataatttataatg

SEQ ID NO: 31993 - DNA, 15 bp, Homo sapiens
tataatttataatga

SEQ ID NO: 31994 - DNA, 15 bp, Homo sapiens
ataatttataatgaa

SEQ ID NO: 31995 - DNA, 15 bp, Homo sapiens
taatttataatgaaa

SEQ ID NO: 31996 - DNA, 15 bp, Homo sapiens
aatttataatgaaat

SEQ ID NO: 31997 - DNA, 15 bp, Homo sapiens
atttataatgaaatg

SEQ ID NO: 31998 - DNA, 15 bp, Homo sapiens
tttataatgaaatgt

SEQ ID NO: 31999 - DNA, 15 bp, Homo sapiens
ttataatgaaatgtt

SEQ ID NO: 32000 - DNA, 15 bp, Homo sapiens
tataatgaaatgttg

SEQ ID NO: 32001 - DNA, 15 bp, Homo sapiens
ataatgaaatgttga

SEQ ID NO: 32002 - DNA, 15 bp, Homo sapiens
taatgaaatgttgat

SEQ ID NO: 32003 - DNA, 15 bp, Homo sapiens
aatgaaatgttgata

SEQ ID NO: 32004 - DNA, 15 bp, Homo sapiens
atgaaatgttgatac

SEQ ID NO: 32005 - DNA, 15 bp, Homo sapiens
tgaaatgttgataca

SEQ ID NO: 32006 - DNA, 15 bp, Homo sapiens
gaaatgttgatacat

SEQ ID NO: 32007 - DNA, 15 bp, Homo sapiens
aaatgttgatacata

SEQ ID NO: 32008 - DNA, 15 bp, Homo sapiens
aatgttgatacatac

SEQ ID NO: 32009 - DNA, 15 bp, Homo sapiens
atgttgatacatact

SEQ ID NO: 32010 - DNA, 15 bp, Homo sapiens
tgttgatacatactt

SEQ ID NO: 32011 - DNA, 15 bp, Homo sapiens
gttgatacatactta

SEQ ID NO: 32012 - DNA, 15 bp, Homo sapiens
ttgatacatacttaa

SEQ ID NO: 32013 - DNA, 15 bp, Homo sapiens
tgatacatacttaaa

SEQ ID NO: 32014 - DNA, 15 bp, Homo sapiens
gatacatacttaaaa

SEQ ID NO: 32015 - DNA, 15 bp, Homo sapiens
atacatacttaaaag

SEQ ID NO: 32016 - DNA, 15 bp, Homo sapiens
tacatacttaaaagc

SEQ ID NO: 32017 - DNA, 15 bp, Homo sapiens
acatacttaaaagct

SEQ ID NO: 32018 - DNA, 15 bp, Homo sapiens
catacttaaaagcta

SEQ ID NO: 32019 - DNA, 15 bp, Homo sapiens
atacttaaaagctac

SEQ ID NO: 32020 - DNA, 15 bp, Homo sapiens
tacttaaaagctact

SEQ ID NO: 32021 - DNA, 15 bp, Homo sapiens
acttaaaagctactg

SEQ ID NO: 32022 - DNA, 15 bp, Homo sapiens
cttaaaagctactgc

SEQ ID NO: 32023 - DNA, 15 bp, Homo sapiens
ttaaaagctactgca

SEQ ID NO: 32024 - DNA, 15 bp, Homo sapiens
taaaagctactgcag

SEQ ID NO: 32025 - DNA, 15 bp, Homo sapiens
aaaagctactgcagc

SEQ ID NO: 32026 - DNA, 15 bp, Homo sapiens
aaagctactgcagct

SEQ ID NO: 32027 - DNA, 15 bp, Homo sapiens
aagctactgcagctg

SEQ ID NO: 32028 - DNA, 15 bp, Homo sapiens
agctactgcagctgt

SEQ ID NO: 32029 - DNA, 15 bp, Homo sapiens
gctactgcagctgta

SEQ ID NO: 32030 - DNA, 15 bp, Homo sapiens
ctactgcagctgtag

SEQ ID NO: 32031 - DNA, 15 bp, Homo sapiens
tactgcagctgtagc

SEQ ID NO: 32032 - DNA, 15 bp, Homo sapiens
actgcagctgtagct

SEQ ID NO: 32033 - DNA, 15 bp, Homo sapiens
ctgcagctgtagcta

SEQ ID NO: 32034 - DNA, 15 bp, Homo sapiens
tgcagctgtagctat

SEQ ID NO: 32035 - DNA, 15 bp, Homo sapiens
gcagctgtagctata

SEQ ID NO: 32036 - DNA, 15 bp, Homo sapiens
cagctgtagctatac

SEQ ID NO: 32037 - DNA, 15 bp, Homo sapiens
agctgtagctatact

SEQ ID NO: 32038 - DNA, 15 bp, Homo sapiens
gctgtagctatacta

SEQ ID NO: 32039 - DNA, 15 bp, Homo sapiens
ctgtagctatactaa

SEQ ID NO: 32040 - DNA, 15 bp, Homo sapiens
tgtagctatactaaa

SEQ ID NO: 32041 - DNA, 15 bp, Homo sapiens
gtagctatactaaaa

SEQ ID NO: 32042 - DNA, 15 bp, Homo sapiens
tagctatactaaaat

SEQ ID NO: 32043 - DNA, 15 bp, Homo sapiens
agctatactaaaata

SEQ ID NO: 32044 - DNA, 15 bp, Homo sapiens
gctatactaaaataa

SEQ ID NO: 32045 - DNA, 15 bp, Homo sapiens
ctatactaaaataag

SEQ ID NO: 32046 - DNA, 15 bp, Homo sapiens
tatactaaaataaga

SEQ ID NO: 32047 - DNA, 15 bp, Homo sapiens
atactaaaataagat

SEQ ID NO: 32048 - DNA, 15 bp, Homo sapiens
tactaaaataagatt

SEQ ID NO: 32049 - DNA, 15 bp, Homo sapiens
actaaaataagattt

SEQ ID NO: 32050 - DNA, 15 bp, Homo sapiens
ctaaaataagatttc

SEQ ID NO: 32051 - DNA, 15 bp, Homo sapiens
taaaataagatttct

SEQ ID NO: 32052 - DNA, 15 bp, Homo sapiens
aaaataagatttctt

SEQ ID NO: 32053 - DNA, 15 bp, Homo sapiens
aaataagatttcttc

SEQ ID NO: 32054 - DNA, 15 bp, Homo sapiens
aataagatttcttca

SEQ ID NO: 32055 - DNA, 15 bp, Homo sapiens
ataagatttcttcag

SEQ ID NO: 32056 - DNA, 15 bp, Homo sapiens
taagatttcttcagg

SEQ ID NO: 32057 - DNA, 15 bp, Homo sapiens
aagatttcttcaggg

SEQ ID NO: 32058 - DNA, 15 bp, Homo sapiens
agatttcttcagggt

SEQ ID NO: 32059 - DNA, 15 bp, Homo sapiens
gatttcttcagggtt

SEQ ID NO: 32060 - DNA, 15 bp, Homo sapiens
atttcttcagggttt

SEQ ID NO: 32061 - DNA, 15 bp, Homo sapiens
tttcttcagggttta

SEQ ID NO: 32062 - DNA, 15 bp, Homo sapiens
ttcttcagggtttac

SEQ ID NO: 32063 - DNA, 15 bp, Homo sapiens
tcttcagggtttact

SEQ ID NO: 32064 - DNA, 15 bp, Homo sapiens
cttcagggtttactt

SEQ ID NO: 32065 - DNA, 15 bp, Homo sapiens
ttcagggtttactta

SEQ ID NO: 32066 - DNA, 15 bp, Homo sapiens
tcagggtttacttac

SEQ ID NO: 32067 - DNA, 15 bp, Homo sapiens
cagggtttacttacc

SEQ ID NO: 32068 - DNA, 15 bp, Homo sapiens
agggtttacttaccc

SEQ ID NO: 32069 - DNA, 15 bp, Homo sapiens
gggtttacttaccct

SEQ ID NO: 32070 - DNA, 15 bp, Homo sapiens
ggtttacttaccctg

SEQ ID NO: 32071 - DNA, 15 bp, Homo sapiens
gtttacttaccctga

SEQ ID NO: 32072 - DNA, 15 bp, Homo sapiens
tttacttaccctgaa

SEQ ID NO: 32073 - DNA, 15 bp, Homo sapiens
ttacttaccctgaaa

SEQ ID NO: 32074 - DNA, 15 bp, Homo sapiens
tacttaccctgaaat

SEQ ID NO: 32075 - DNA, 15 bp, Homo sapiens
acttaccctgaaatg

SEQ ID NO: 32076 - DNA, 15 bp, Homo sapiens
cttaccctgaaatgc

SEQ ID NO: 32077 - DNA, 15 bp, Homo sapiens
ttaccctgaaatgca

SEQ ID NO: 32078 - DNA, 15 bp, Homo sapiens
taccctgaaatgcaa

SEQ ID NO: 32079 - DNA, 15 bp, Homo sapiens
accctgaaatgcaag

SEQ ID NO: 32080 - DNA, 15 bp, Homo sapiens
ccctgaaatgcaaga

SEQ ID NO: 32081 - DNA, 15 bp, Homo sapiens
cctgaaatgcaagaa

SEQ ID NO: 32082 - DNA, 15 bp, Homo sapiens
ctgaaatgcaagaat

SEQ ID NO: 32083 - DNA, 15 bp, Homo sapiens
tgaaatgcaagaata

SEQ ID NO: 32084 - DNA, 15 bp, Homo sapiens
gaaatgcaagaatac

SEQ ID NO: 32085 - DNA, 15 bp, Homo sapiens
aaatgcaagaataca

SEQ ID NO: 32086 - DNA, 15 bp, Homo sapiens
aatgcaagaatacaa

SEQ ID NO: 32087 - DNA, 15 bp, Homo sapiens
atgcaagaatacaag

SEQ ID NO: 32088 - DNA, 15 bp, Homo sapiens
tgcaagaatacaagc

SEQ ID NO: 32089 - DNA, 15 bp, Homo sapiens
gcaagaatacaagca

SEQ ID NO: 32090 - DNA, 15 bp, Homo sapiens
caagaatacaagcat

SEQ ID NO: 32091 - DNA, 15 bp, Homo sapiens
aagaatacaagcata

SEQ ID NO: 32092 - DNA, 15 bp, Homo sapiens
agaatacaagcataa

SEQ ID NO: 32093 - DNA, 15 bp, Homo sapiens
gaatacaagcataac

SEQ ID NO: 32094 - DNA, 15 bp, Homo sapiens
aatacaagcataaca

SEQ ID NO: 32095 - DNA, 15 bp, Homo sapiens
atacaagcataacaa

SEQ ID NO: 32096 - DNA, 15 bp, Homo sapiens
tacaagcataacaat

SEQ ID NO: 32097 - DNA, 15 bp, Homo sapiens
acaagcataacaata

SEQ ID NO: 32098 - DNA, 15 bp, Homo sapiens
caagcataacaataa

SEQ ID NO: 32099 - DNA, 15 bp, Homo sapiens
aagcataacaataat

SEQ ID NO: 32100 - DNA, 15 bp, Homo sapiens
agcataacaataata

SEQ ID NO: 32101 - DNA, 15 bp, Homo sapiens
gcataacaataatat

SEQ ID NO: 32102 - DNA, 15 bp, Homo sapiens
cataacaataatatt

SEQ ID NO: 32103 - DNA, 15 bp, Homo sapiens
ataacaataatatta

SEQ ID NO: 32104 - DNA, 15 bp, Homo sapiens
taacaataatattac

SEQ ID NO: 32105 - DNA, 15 bp, Homo sapiens
aacaataatattact

SEQ ID NO: 32106 - DNA, 15 bp, Homo sapiens
acaataatattactg

SEQ ID NO: 32107 - DNA, 15 bp, Homo sapiens
caataatattactgt

SEQ ID NO: 32108 - DNA, 15 bp, Homo sapiens
aataatattactgtt

SEQ ID NO: 32109 - DNA, 15 bp, Homo sapiens
ataatattactgttt

SEQ ID NO: 32110 - DNA, 15 bp, Homo sapiens
taatattactgtttt

SEQ ID NO: 32111 - DNA, 15 bp, Homo sapiens
aatattactgttttt

SEQ ID NO: 32112 - DNA, 15 bp, Homo sapiens
atattactgttttta

SEQ ID NO: 32113 - DNA, 15 bp, Homo sapiens
tattactgtttttat

SEQ ID NO: 32114 - DNA, 15 bp, Homo sapiens
attactgtttttata

SEQ ID NO: 32115 - DNA, 15 bp, Homo sapiens
ttactgtttttatat

SEQ ID NO: 32116 - DNA, 15 bp, Homo sapiens
tactgtttttatatg

SEQ ID NO: 32117 - DNA, 15 bp, Homo sapiens
actgtttttatatgc

SEQ ID NO: 32118 - DNA, 15 bp, Homo sapiens
ctgtttttatatgca

SEQ ID NO: 32119 - DNA, 15 bp, Homo sapiens
tgtttttatatgcac

SEQ ID NO: 32120 - DNA, 15 bp, Homo sapiens
gtttttatatgcacc

SEQ ID NO: 32121 - DNA, 15 bp, Homo sapiens
tttttatatgcacca

SEQ ID NO: 32122 - DNA, 15 bp, Homo sapiens
ttttatatgcaccaa

SEQ ID NO: 32123 - DNA, 15 bp, Homo sapiens
tttatatgcaccaat

SEQ ID NO: 32124 - DNA, 15 bp, Homo sapiens
ttatatgcaccaata

SEQ ID NO: 32125 - DNA, 15 bp, Homo sapiens
tatatgcaccaatac

SEQ ID NO: 32126 - DNA, 15 bp, Homo sapiens
atatgcaccaatacc

SEQ ID NO: 32127 - DNA, 15 bp, Homo sapiens
tatgcaccaatacct

SEQ ID NO: 32128 - DNA, 15 bp, Homo sapiens
atgcaccaatacctc

SEQ ID NO: 32129 - DNA, 15 bp, Homo sapiens
tgcaccaatacctct

SEQ ID NO: 32130 - DNA, 15 bp, Homo sapiens
gcaccaatacctctc

SEQ ID NO: 32131 - DNA, 15 bp, Homo sapiens
caccaatacctctct

SEQ ID NO: 32132 - DNA, 15 bp, Homo sapiens
accaatacctctctt

SEQ ID NO: 32133 - DNA, 15 bp, Homo sapiens
ccaatacctctcttt

SEQ ID NO: 32134 - DNA, 15 bp, Homo sapiens
caatacctctcttta

SEQ ID NO: 32135 - DNA, 15 bp, Homo sapiens
aatacctctctttaa

SEQ ID NO: 32136 - DNA, 15 bp, Homo sapiens
atacctctctttaat

SEQ ID NO: 32137 - DNA, 15 bp, Homo sapiens
tacctctctttaata

SEQ ID NO: 32138 - DNA, 15 bp, Homo sapiens
acctctctttaatat

SEQ ID NO: 32139 - DNA, 15 bp, Homo sapiens
cctctctttaatata

SEQ ID NO: 32140 - DNA, 15 bp, Homo sapiens
ctctctttaatatat

SEQ ID NO: 32141 - DNA, 15 bp, Homo sapiens
tctctttaatatata

SEQ ID NO: 32142 - DNA, 15 bp, Homo sapiens
ctctttaatatataa

SEQ ID NO: 32143 - DNA, 15 bp, Homo sapiens
tctttaatatataaa

SEQ ID NO: 32144 - DNA, 15 bp, Homo sapiens
ctttaatatataaag

SEQ ID NO: 32145 - DNA, 15 bp, Homo sapiens
tttaatatataaagc

SEQ ID NO: 32146 - DNA, 15 bp, Homo sapiens
ttaatatataaagct

SEQ ID NO: 32147 - DNA, 15 bp, Homo sapiens
taatatataaagctc

SEQ ID NO: 32148 - DNA, 15 bp, Homo sapiens
aatatataaagctct

SEQ ID NO: 32149 - DNA, 15 bp, Homo sapiens
atatataaagctcta

SEQ ID NO: 32150 - DNA, 15 bp, Homo sapiens
tatataaagctctac

SEQ ID NO: 32151 - DNA, 15 bp, Homo sapiens
atataaagctctaca

SEQ ID NO: 32152 - DNA, 15 bp, Homo sapiens
tataaagctctacaa

SEQ ID NO: 32153 - DNA, 15 bp, Homo sapiens
ataaagctctacaac

SEQ ID NO: 32154 - DNA, 15 bp, Homo sapiens
taaagctctacaaca

SEQ ID NO: 32155 - DNA, 15 bp, Homo sapiens
aaagctctacaacaa

SEQ ID NO: 32156 - DNA, 15 bp, Homo sapiens
aagctctacaacaaa

SEQ ID NO: 32157 - DNA, 15 bp, Homo sapiens
agctctacaacaaat

SEQ ID NO: 32158 - DNA, 15 bp, Homo sapiens
gctctacaacaaata

SEQ ID NO: 32159 - DNA, 15 bp, Homo sapiens
ctctacaacaaatac

SEQ ID NO: 32160 - DNA, 15 bp, Homo sapiens
tctacaacaaatacc

SEQ ID NO: 32161 - DNA, 15 bp, Homo sapiens
ctacaacaaatacct

SEQ ID NO: 32162 - DNA, 15 bp, Homo sapiens
tacaacaaatacctc

SEQ ID NO: 32163 - DNA, 15 bp, Homo sapiens
acaacaaatacctct

SEQ ID NO: 32164 - DNA, 15 bp, Homo sapiens
caacaaatacctcta

SEQ ID NO: 32165 - DNA, 15 bp, Homo sapiens
aacaaatacctctaa

SEQ ID NO: 32166 - DNA, 15 bp, Homo sapiens
acaaatacctctaat

SEQ ID NO: 32167 - DNA, 15 bp, Homo sapiens
caaatacctctaata

SEQ ID NO: 32168 - DNA, 15 bp, Homo sapiens
aaatacctctaataa

SEQ ID NO: 32169 - DNA, 15 bp, Homo sapiens
aatacctctaataat

SEQ ID NO: 32170 - DNA, 15 bp, Homo sapiens
atacctctaataatt

SEQ ID NO: 32171 - DNA, 15 bp, Homo sapiens
tacctctaataattt

SEQ ID NO: 32172 - DNA, 15 bp, Homo sapiens
acctctaataatttt

SEQ ID NO: 32173 - DNA, 15 bp, Homo sapiens
cctctaataatttta

SEQ ID NO: 32174 - DNA, 15 bp, Homo sapiens
ctctaataattttac

SEQ ID NO: 32175 - DNA, 15 bp, Homo sapiens
tctaataattttaca

SEQ ID NO: 32176 - DNA, 15 bp, Homo sapiens
ctaataattttacaa

SEQ ID NO: 32177 - DNA, 15 bp, Homo sapiens
taataattttacaat

SEQ ID NO: 32178 - DNA, 15 bp, Homo sapiens
aataattttacaatt

SEQ ID NO: 32179 - DNA, 15 bp, Homo sapiens
ataattttacaatta

SEQ ID NO: 32180 - DNA, 15 bp, Homo sapiens
taattttacaattaa

SEQ ID NO: 32181 - DNA, 15 bp, Homo sapiens
aattttacaattaaa

SEQ ID NO: 32182 - DNA, 15 bp, Homo sapiens
attttacaattaaat

SEQ ID NO: 32183 - DNA, 15 bp, Homo sapiens
ttttacaattaaatt

SEQ ID NO: 32184 - DNA, 15 bp, Homo sapiens
tttacaattaaatta

SEQ ID NO: 32185 - DNA, 15 bp, Homo sapiens
ttacaattaaattaa

SEQ ID NO: 32186 - DNA, 15 bp, Homo sapiens
tacaattaaattaag

SEQ ID NO: 32187 - DNA, 15 bp, Homo sapiens
acaattaaattaagt

SEQ ID NO: 32188 - DNA, 15 bp, Homo sapiens
caattaaattaagtc

SEQ ID NO: 32189 - DNA, 15 bp, Homo sapiens
aattaaattaagtcc

SEQ ID NO: 32190 - DNA, 15 bp, Homo sapiens
attaaattaagtcca

SEQ ID NO: 32191 - DNA, 15 bp, Homo sapiens
ttaaattaagtccat

SEQ ID NO: 32192 - DNA, 15 bp, Homo sapiens
taaattaagtccata

SEQ ID NO: 32193 - DNA, 15 bp, Homo sapiens
aaattaagtccatac

SEQ ID NO: 32194 - DNA, 15 bp, Homo sapiens
aattaagtccatact

SEQ ID NO: 32195 - DNA, 15 bp, Homo sapiens
attaagtccatactt

SEQ ID NO: 32196 - DNA, 15 bp, Homo sapiens
ttaagtccatacttc

SEQ ID NO: 32197 - DNA, 15 bp, Homo sapiens
taagtccatacttct

SEQ ID NO: 32198 - DNA, 15 bp, Homo sapiens
aagtccatacttcta

SEQ ID NO: 32199 - DNA, 15 bp, Homo sapiens
agtccatacttctat

SEQ ID NO: 32200 - DNA, 15 bp, Homo sapiens
gtccatacttctata

SEQ ID NO: 32201 - DNA, 15 bp, Homo sapiens
tccatacttctatac

SEQ ID NO: 32202 - DNA, 15 bp, Homo sapiens
ccatacttctatact

SEQ ID NO: 32203 - DNA, 15 bp, Homo sapiens
catacttctatacta

SEQ ID NO: 32204 - DNA, 15 bp, Homo sapiens
atacttctatactac

SEQ ID NO: 32205 - DNA, 15 bp, Homo sapiens
tacttctatactact

SEQ ID NO: 32206 - DNA, 15 bp, Homo sapiens
acttctatactactt

SEQ ID NO: 32207 - DNA, 15 bp, Homo sapiens
cttctatactacttt

SEQ ID NO: 32208 - DNA, 15 bp, Homo sapiens
ttctatactactttg

SEQ ID NO: 32209 - DNA, 15 bp, Homo sapiens
tctatactactttgg

SEQ ID NO: 32210 - DNA, 15 bp, Homo sapiens
ctatactactttggt

SEQ ID NO: 32211 - DNA, 15 bp, Homo sapiens
tatactactttggtc

SEQ ID NO: 32212 - DNA, 15 bp, Homo sapiens
atactactttggtct

SEQ ID NO: 32213 - DNA, 15 bp, Homo sapiens
tactactttggtctc

SEQ ID NO: 32214 - DNA, 15 bp, Homo sapiens
actactttggtctca

SEQ ID NO: 32215 - DNA, 15 bp, Homo sapiens
ctactttggtctcaa

SEQ ID NO: 32216 - DNA, 15 bp, Homo sapiens
tactttggtctcaac

SEQ ID NO: 32217 - DNA, 15 bp, Homo sapiens
actttggtctcaaca

SEQ ID NO: 32218 - DNA, 15 bp, Homo sapiens
ctttggtctcaacat

SEQ ID NO: 32219 - DNA, 15 bp, Homo sapiens
tttggtctcaacatt

SEQ ID NO: 32220 - DNA, 15 bp, Homo sapiens
ttggtctcaacattt

SEQ ID NO: 32221 - DNA, 15 bp, Homo sapiens
tggtctcaacatttt

SEQ ID NO: 32222 - DNA, 15 bp, Homo sapiens
ggtctcaacattttt

SEQ ID NO: 32223 - DNA, 15 bp, Homo sapiens
gtctcaacattttta

SEQ ID NO: 32224 - DNA, 15 bp, Homo sapiens
tctcaacatttttaa

SEQ ID NO: 32225 - DNA, 15 bp, Homo sapiens
ctcaacatttttaaa

SEQ ID NO: 32226 - DNA, 15 bp, Homo sapiens
tcaacatttttaaaa

SEQ ID NO: 32227 - DNA, 15 bp, Homo sapiens
caacatttttaaaac

SEQ ID NO: 32228 - DNA, 15 bp, Homo sapiens
aacatttttaaaaca

SEQ ID NO: 32229 - DNA, 15 bp, Homo sapiens
acatttttaaaacat

SEQ ID NO: 32230 - DNA, 15 bp, Homo sapiens
catttttaaaacatc

SEQ ID NO: 32231 - DNA, 15 bp, Homo sapiens
atttttaaaacatca

SEQ ID NO: 32232 - DNA, 15 bp, Homo sapiens
tttttaaaacatcaa

SEQ ID NO: 32233 - DNA, 15 bp, Homo sapiens
ttttaaaacatcaat

SEQ ID NO: 32234 - DNA, 15 bp, Homo sapiens
tttaaaacatcaatt

SEQ ID NO: 32235 - DNA, 15 bp, Homo sapiens
ttaaaacatcaatta

SEQ ID NO: 32236 - DNA, 15 bp, Homo sapiens
taaaacatcaattaa

SEQ ID NO: 32237 - DNA, 15 bp, Homo sapiens
aaaacatcaattaat

SEQ ID NO: 32238 - DNA, 15 bp, Homo sapiens
aaacatcaattaatt

SEQ ID NO: 32239 - DNA, 15 bp, Homo sapiens
aacatcaattaattt

SEQ ID NO: 32240 - DNA, 15 bp, Homo sapiens
acatcaattaatttt

SEQ ID NO: 32241 - DNA, 15 bp, Homo sapiens
catcaattaattttg

SEQ ID NO: 32242 - DNA, 15 bp, Homo sapiens
atcaattaattttga

SEQ ID NO: 32243 - DNA, 15 bp, Homo sapiens
tcaattaattttgaa

SEQ ID NO: 32244 - DNA, 15 bp, Homo sapiens
caattaattttgaaa

SEQ ID NO: 32245 - DNA, 15 bp, Homo sapiens
aattaattttgaaaa

SEQ ID NO: 32246 - DNA, 15 bp, Homo sapiens
attaattttgaaaat

SEQ ID NO: 32247 - DNA, 15 bp, Homo sapiens
ttaattttgaaaatt

SEQ ID NO: 32248 - DNA, 15 bp, Homo sapiens
taattttgaaaattt

SEQ ID NO: 32249 - DNA, 15 bp, Homo sapiens
aattttgaaaattta

SEQ ID NO: 32250 - DNA, 15 bp, Homo sapiens
attttgaaaatttac

SEQ ID NO: 32251 - DNA, 15 bp, Homo sapiens
ttttgaaaatttaca

SEQ ID NO: 32252 - DNA, 15 bp, Homo sapiens
tttgaaaatttacaa

SEQ ID NO: 32253 - DNA, 15 bp, Homo sapiens
ttgaaaatttacaat

SEQ ID NO: 32254 - DNA, 15 bp, Homo sapiens
tgaaaatttacaatt

SEQ ID NO: 32255 - DNA, 15 bp, Homo sapiens
gaaaatttacaattt

SEQ ID NO: 32256 - DNA, 15 bp, Homo sapiens
aaaatttacaattta

SEQ ID NO: 32257 - DNA, 15 bp, Homo sapiens
aaatttacaatttaa

SEQ ID NO: 32258 - DNA, 15 bp, Homo sapiens
aatttacaatttaac

SEQ ID NO: 32259 - DNA, 15 bp, Homo sapiens
atttacaatttaaca

SEQ ID NO: 32260 - DNA, 15 bp, Homo sapiens
tttacaatttaacaa

SEQ ID NO: 32261 - DNA, 15 bp, Homo sapiens
ttacaatttaacaac

SEQ ID NO: 32262 - DNA, 15 bp, Homo sapiens
tacaatttaacaaca

SEQ ID NO: 32263 - DNA, 15 bp, Homo sapiens
acaatttaacaacat

SEQ ID NO: 32264 - DNA, 15 bp, Homo sapiens
caatttaacaacatg

SEQ ID NO: 32265 - DNA, 15 bp, Homo sapiens
aatttaacaacatga

SEQ ID NO: 32266 - DNA, 15 bp, Homo sapiens
atttaacaacatgat

SEQ ID NO: 32267 - DNA, 15 bp, Homo sapiens
tttaacaacatgatc

SEQ ID NO: 32268 - DNA, 15 bp, Homo sapiens
ttaacaacatgatcc

SEQ ID NO: 32269 - DNA, 15 bp, Homo sapiens
taacaacatgatcct

SEQ ID NO: 32270 - DNA, 15 bp, Homo sapiens
aacaacatgatccta

SEQ ID NO: 32271 - DNA, 15 bp, Homo sapiens
acaacatgatcctat

SEQ ID NO: 32272 - DNA, 15 bp, Homo sapiens
caacatgatcctatc

SEQ ID NO: 32273 - DNA, 15 bp, Homo sapiens
aacatgatcctatca

SEQ ID NO: 32274 - DNA, 15 bp, Homo sapiens
acatgatcctatcaa

SEQ ID NO: 32275 - DNA, 15 bp, Homo sapiens
catgatcctatcaat

SEQ ID NO: 32276 - DNA, 15 bp, Homo sapiens
atgatcctatcaata

SEQ ID NO: 32277 - DNA, 15 bp, Homo sapiens
tgatcctatcaataa

SEQ ID NO: 32278 - DNA, 15 bp, Homo sapiens
gatcctatcaataac

SEQ ID NO: 32279 - DNA, 15 bp, Homo sapiens
atcctatcaataaca

SEQ ID NO: 32280 - DNA, 15 bp, Homo sapiens
tcctatcaataacaa

SEQ ID NO: 32281 - DNA, 15 bp, Homo sapiens
cctatcaataacaag

SEQ ID NO: 32282 - DNA, 15 bp, Homo sapiens
ctatcaataacaagc

SEQ ID NO: 32283 - DNA, 15 bp, Homo sapiens
tatcaataacaagca

SEQ ID NO: 32284 - DNA, 15 bp, Homo sapiens
atcaataacaagcac

SEQ ID NO: 32285 - DNA, 15 bp, Homo sapiens
tcaataacaagcaca

SEQ ID NO: 32286 - DNA, 15 bp, Homo sapiens
caataacaagcacat

SEQ ID NO: 32287 - DNA, 15 bp, Homo sapiens
aataacaagcacatt

SEQ ID NO: 32288 - DNA, 15 bp, Homo sapiens
ataacaagcacattt

SEQ ID NO: 32289 - DNA, 15 bp, Homo sapiens
taacaagcacatttt

SEQ ID NO: 32290 - DNA, 15 bp, Homo sapiens
aacaagcacattttg

SEQ ID NO: 32291 - DNA, 15 bp, Homo sapiens
acaagcacattttgt

SEQ ID NO: 32292 - DNA, 15 bp, Homo sapiens
caagcacattttgta

SEQ ID NO: 32293 - DNA, 15 bp, Homo sapiens
aagcacattttgtag

SEQ ID NO: 32294 - DNA, 15 bp, Homo sapiens
agcacattttgtagt

SEQ ID NO: 32295 - DNA, 15 bp, Homo sapiens
gcacattttgtagtg

SEQ ID NO: 32296 - DNA, 15 bp, Homo sapiens
cacattttgtagtgg

SEQ ID NO: 32297 - DNA, 15 bp, Homo sapiens
acattttgtagtgga

SEQ ID NO: 32298 - DNA, 15 bp, Homo sapiens
cattttgtagtggat

SEQ ID NO: 32299 - DNA, 15 bp, Homo sapiens
attttgtagtggatt

SEQ ID NO: 32300 - DNA, 15 bp, Homo sapiens
ttttgtagtggatta

SEQ ID NO: 32301 - DNA, 15 bp, Homo sapiens
tttgtagtggattaa

SEQ ID NO: 32302 - DNA, 15 bp, Homo sapiens
ttgtagtggattaaa

SEQ ID NO: 32303 - DNA, 15 bp, Homo sapiens
tgtagtggattaaag

SEQ ID NO: 32304 - DNA, 15 bp, Homo sapiens
gtagtggattaaaga

SEQ ID NO: 32305 - DNA, 15 bp, Homo sapiens
tagtggattaaagac

SEQ ID NO: 32306 - DNA, 15 bp, Homo sapiens
agtggattaaagaca

SEQ ID NO: 32307 - DNA, 15 bp, Homo sapiens
gtggattaaagacac

SEQ ID NO: 32308 - DNA, 15 bp, Homo sapiens
tggattaaagacaca

SEQ ID NO: 32309 - DNA, 15 bp, Homo sapiens
ggattaaagacacat

SEQ ID NO: 32310 - DNA, 15 bp, Homo sapiens
gattaaagacacatt

SEQ ID NO: 32311 - DNA, 15 bp, Homo sapiens
attaaagacacattc

SEQ ID NO: 32312 - DNA, 15 bp, Homo sapiens
ttaaagacacattca

SEQ ID NO: 32313 - DNA, 15 bp, Homo sapiens
taaagacacattcaa

SEQ ID NO: 32314 - DNA, 15 bp, Homo sapiens
aaagacacattcaac

SEQ ID NO: 32315 - DNA, 15 bp, Homo sapiens
aagacacattcaacc

SEQ ID NO: 32316 - DNA, 15 bp, Homo sapiens
agacacattcaacca

SEQ ID NO: 32317 - DNA, 15 bp, Homo sapiens
gacacattcaaccat

SEQ ID NO: 32318 - DNA, 15 bp, Homo sapiens
acacattcaaccatg

SEQ ID NO: 32319 - DNA, 15 bp, Homo sapiens
cacattcaaccatgc

SEQ ID NO: 32320 - DNA, 15 bp, Homo sapiens
acattcaaccatgca

SEQ ID NO: 32321 - DNA, 15 bp, Homo sapiens
cattcaaccatgcaa

SEQ ID NO: 32322 - DNA, 15 bp, Homo sapiens
attcaaccatgcaat

SEQ ID NO: 32323 - DNA, 15 bp, Homo sapiens
ttcaaccatgcaatc

SEQ ID NO: 32324 - DNA, 15 bp, Homo sapiens
tcaaccatgcaatcc

SEQ ID NO: 32325 - DNA, 15 bp, Homo sapiens
caaccatgcaatcca

SEQ ID NO: 32326 - DNA, 15 bp, Homo sapiens
aaccatgcaatccag

SEQ ID NO: 32327 - DNA, 15 bp, Homo sapiens
accatgcaatccagt

SEQ ID NO: 32328 - DNA, 15 bp, Homo sapiens
ccatgcaatccagtg

SEQ ID NO: 32329 - DNA, 15 bp, Homo sapiens
catgcaatccagtgt

SEQ ID NO: 32330 - DNA, 15 bp, Homo sapiens
atgcaatccagtgtt

SEQ ID NO: 32331 - DNA, 15 bp, Homo sapiens
tgcaatccagtgttc

SEQ ID NO: 32332 - DNA, 15 bp, Homo sapiens
gcaatccagtgttca

SEQ ID NO: 32333 - DNA, 15 bp, Homo sapiens
caatccagtgttcaa

SEQ ID NO: 32334 - DNA, 15 bp, Homo sapiens
aatccagtgttcaat

SEQ ID NO: 32335 - DNA, 15 bp, Homo sapiens
atccagtgttcaata

SEQ ID NO: 32336 - DNA, 15 bp, Homo sapiens
tccagtgttcaatac

SEQ ID NO: 32337 - DNA, 15 bp, Homo sapiens
ccagtgttcaatacc

SEQ ID NO: 32338 - DNA, 15 bp, Homo sapiens
cagtgttcaatacct

SEQ ID NO: 32339 - DNA, 15 bp, Homo sapiens
agtgttcaatacctt

SEQ ID NO: 32340 - DNA, 15 bp, Homo sapiens
gtgttcaatacctta

SEQ ID NO: 32341 - DNA, 15 bp, Homo sapiens
tgttcaataccttaa

SEQ ID NO: 32342 - DNA, 15 bp, Homo sapiens
gttcaataccttaat

SEQ ID NO: 32343 - DNA, 15 bp, Homo sapiens
ttcaataccttaatg

SEQ ID NO: 32344 - DNA, 15 bp, Homo sapiens
tcaataccttaatga

SEQ ID NO: 32345 - DNA, 15 bp, Homo sapiens
caataccttaatgat

SEQ ID NO: 32346 - DNA, 15 bp, Homo sapiens
aataccttaatgata

SEQ ID NO: 32347 - DNA, 15 bp, Homo sapiens
ataccttaatgataa

SEQ ID NO: 32348 - DNA, 15 bp, Homo sapiens
taccttaatgataaa

SEQ ID NO: 32349 - DNA, 15 bp, Homo sapiens
accttaatgataaat

SEQ ID NO: 32350 - DNA, 15 bp, Homo sapiens
ccttaatgataaata

SEQ ID NO: 32351 - DNA, 15 bp, Homo sapiens
cttaatgataaataa

SEQ ID NO: 32352 - DNA, 15 bp, Homo sapiens
ttaatgataaataac

SEQ ID NO: 32353 - DNA, 15 bp, Homo sapiens
taatgataaataaca

SEQ ID NO: 32354 - DNA, 15 bp, Homo sapiens
aatgataaataacaa

SEQ ID NO: 32355 - DNA, 15 bp, Homo sapiens
atgataaataacaat

SEQ ID NO: 32356 - DNA, 15 bp, Homo sapiens
tgataaataacaatg

SEQ ID NO: 32357 - DNA, 15 bp, Homo sapiens
gataaataacaatgc

SEQ ID NO: 32358 - DNA, 15 bp, Homo sapiens
ataaataacaatgct

SEQ ID NO: 32359 - DNA, 15 bp, Homo sapiens
taaataacaatgctg

SEQ ID NO: 32360 - DNA, 15 bp, Homo sapiens
aaataacaatgctga

SEQ ID NO: 32361 - DNA, 15 bp, Homo sapiens
aataacaatgctgat

SEQ ID NO: 32362 - DNA, 15 bp, Homo sapiens
ataacaatgctgatt

SEQ ID NO: 32363 - DNA, 15 bp, Homo sapiens
taacaatgctgattg

SEQ ID NO: 32364 - DNA, 15 bp, Homo sapiens
aacaatgctgattga

SEQ ID NO: 32365 - DNA, 15 bp, Homo sapiens
acaatgctgattgac

SEQ ID NO: 32366 - DNA, 15 bp, Homo sapiens
caatgctgattgact

SEQ ID NO: 32367 - DNA, 15 bp, Homo sapiens
aatgctgattgactt

SEQ ID NO: 32368 - DNA, 15 bp, Homo sapiens
atgctgattgacttt

SEQ ID NO: 32369 - DNA, 15 bp, Homo sapiens
tgctgattgactttt

SEQ ID NO: 32370 - DNA, 15 bp, Homo sapiens
gctgattgactttta

SEQ ID NO: 32371 - DNA, 15 bp, Homo sapiens
ctgattgacttttat

SEQ ID NO: 32372 - DNA, 15 bp, Homo sapiens
tgattgacttttatt

SEQ ID NO: 32373 - DNA, 15 bp, Homo sapiens
gattgacttttattt

SEQ ID NO: 32374 - DNA, 15 bp, Homo sapiens
attgacttttatttt

SEQ ID NO: 32375 - DNA, 15 bp, Homo sapiens
ttgacttttattttg

SEQ ID NO: 32376 - DNA, 15 bp, Homo sapiens
tgacttttattttga

SEQ ID NO: 32377 - DNA, 15 bp, Homo sapiens
gacttttattttgaa

SEQ ID NO: 32378 - DNA, 15 bp, Homo sapiens
acttttattttgaaa

SEQ ID NO: 32379 - DNA, 15 bp, Homo sapiens
cttttattttgaaaa

SEQ ID NO: 32380 - DNA, 15 bp, Homo sapiens
ttttattttgaaaaa

SEQ ID NO: 32381 - DNA, 15 bp, Homo sapiens
tttattttgaaaaat

SEQ ID NO: 32382 - DNA, 15 bp, Homo sapiens
ttattttgaaaaatc

SEQ ID NO: 32383 - DNA, 15 bp, Homo sapiens
tattttgaaaaatca

SEQ ID NO: 32384 - DNA, 15 bp, Homo sapiens
attttgaaaaatcat

SEQ ID NO: 32385 - DNA, 15 bp, Homo sapiens
ttttgaaaaatcatt

SEQ ID NO: 32386 - DNA, 15 bp, Homo sapiens
tttgaaaaatcattg

SEQ ID NO: 32387 - DNA, 15 bp, Homo sapiens
ttgaaaaatcattga

SEQ ID NO: 32388 - DNA, 15 bp, Homo sapiens
tgaaaaatcattgaa

SEQ ID NO: 32389 - DNA, 15 bp, Homo sapiens
gaaaaatcattgaaa

SEQ ID NO: 32390 - DNA, 15 bp, Homo sapiens
aaaaatcattgaaaa

SEQ ID NO: 32391 - DNA, 15 bp, Homo sapiens
aaaatcattgaaaac

SEQ ID NO: 32392 - DNA, 15 bp, Homo sapiens
aaatcattgaaaact

SEQ ID NO: 32393 - DNA, 15 bp, Homo sapiens
aatcattgaaaactg

SEQ ID NO: 32394 - DNA, 15 bp, Homo sapiens
atcattgaaaactgg

SEQ ID NO: 32395 - DNA, 15 bp, Homo sapiens
tcattgaaaactgga

SEQ ID NO: 32396 - DNA, 15 bp, Homo sapiens
cattgaaaactggaa

SEQ ID NO: 32397 - DNA, 15 bp, Homo sapiens
attgaaaactggaat

SEQ ID NO: 32398 - DNA, 15 bp, Homo sapiens
ttgaaaactggaata

SEQ ID NO: 32399 - DNA, 15 bp, Homo sapiens
tgaaaactggaataa

SEQ ID NO: 32400 - DNA, 15 bp, Homo sapiens
gaaaactggaataat

SEQ ID NO: 32401 - DNA, 15 bp, Homo sapiens
aaaactggaataatc

SEQ ID NO: 32402 - DNA, 15 bp, Homo sapiens
aaactggaataatca

SEQ ID NO: 32403 - DNA, 15 bp, Homo sapiens
aactggaataatcat

SEQ ID NO: 32404 - DNA, 15 bp, Homo sapiens
actggaataatcatc

SEQ ID NO: 32405 - DNA, 15 bp, Homo sapiens
ctggaataatcatct

SEQ ID NO: 32406 - DNA, 15 bp, Homo sapiens
tggaataatcatctg

SEQ ID NO: 32407 - DNA, 15 bp, Homo sapiens
ggaataatcatctga

SEQ ID NO: 32408 - DNA, 15 bp, Homo sapiens
gaataatcatctgag

SEQ ID NO: 32409 - DNA, 15 bp, Homo sapiens
aataatcatctgaga

SEQ ID NO: 32410 - DNA, 15 bp, Homo sapiens
ataatcatctgagac

SEQ ID NO: 32411 - DNA, 15 bp, Homo sapiens
taatcatctgagact

SEQ ID NO: 32412 - DNA, 15 bp, Homo sapiens
aatcatctgagactc

SEQ ID NO: 32413 - DNA, 15 bp, Homo sapiens
atcatctgagactca

SEQ ID NO: 32414 - DNA, 15 bp, Homo sapiens
tcatctgagactcac

SEQ ID NO: 32415 - DNA, 15 bp, Homo sapiens
catctgagactcaca

SEQ ID NO: 32416 - DNA, 15 bp, Homo sapiens
atctgagactcacag

SEQ ID NO: 32417 - DNA, 15 bp, Homo sapiens
tctgagactcacagt

SEQ ID NO: 32418 - DNA, 15 bp, Homo sapiens
ctgagactcacagtg

SEQ ID NO: 32419 - DNA, 15 bp, Homo sapiens
tgagactcacagtga

SEQ ID NO: 32420 - DNA, 15 bp, Homo sapiens
gagactcacagtgat

SEQ ID NO: 32421 - DNA, 15 bp, Homo sapiens
agactcacagtgatc

SEQ ID NO: 32422 - DNA, 15 bp, Homo sapiens
gactcacagtgatca

SEQ ID NO: 32423 - DNA, 15 bp, Homo sapiens
actcacagtgatcac

SEQ ID NO: 32424 - DNA, 15 bp, Homo sapiens
ctcacagtgatcaca

SEQ ID NO: 32425 - DNA, 15 bp, Homo sapiens
tcacagtgatcacaa

SEQ ID NO: 32426 - DNA, 15 bp, Homo sapiens
cacagtgatcacaaa

SEQ ID NO: 32427 - DNA, 15 bp, Homo sapiens
acagtgatcacaaac

SEQ ID NO: 32428 - DNA, 15 bp, Homo sapiens
cagtgatcacaaaca

SEQ ID NO: 32429 - DNA, 15 bp, Homo sapiens
agtgatcacaaacat

SEQ ID NO: 32430 - DNA, 15 bp, Homo sapiens
gtgatcacaaacatg

SEQ ID NO: 32431 - DNA, 15 bp, Homo sapiens
tgatcacaaacatgc

SEQ ID NO: 32432 - DNA, 15 bp, Homo sapiens
gatcacaaacatgca

SEQ ID NO: 32433 - DNA, 15 bp, Homo sapiens
atcacaaacatgcag

SEQ ID NO: 32434 - DNA, 15 bp, Homo sapiens
tcacaaacatgcaga

SEQ ID NO: 32435 - DNA, 15 bp, Homo sapiens
cacaaacatgcagaa

SEQ ID NO: 32436 - DNA, 15 bp, Homo sapiens
acaaacatgcagaaa

SEQ ID NO: 32437 - DNA, 15 bp, Homo sapiens
caaacatgcagaaaa

SEQ ID NO: 32438 - DNA, 15 bp, Homo sapiens
aaacatgcagaaaaa

SEQ ID NO: 32439 - DNA, 15 bp, Homo sapiens
aacatgcagaaaaaa

SEQ ID NO: 32440 - DNA, 15 bp, Homo sapiens
acatgcagaaaaaag

SEQ ID NO: 32441 - DNA, 15 bp, Homo sapiens
catgcagaaaaaagc

SEQ ID NO: 32442 - DNA, 15 bp, Homo sapiens
atgcagaaaaaagca

SEQ ID NO: 32443 - DNA, 15 bp, Homo sapiens
tgcagaaaaaagcat

SEQ ID NO: 32444 - DNA, 15 bp, Homo sapiens
gcagaaaaaagcata

SEQ ID NO: 32445 - DNA, 15 bp, Homo sapiens
cagaaaaaagcatac

SEQ ID NO: 32446 - DNA, 15 bp, Homo sapiens
agaaaaaagcataca

SEQ ID NO: 32447 - DNA, 15 bp, Homo sapiens
gaaaaaagcatacaa

SEQ ID NO: 32448 - DNA, 15 bp, Homo sapiens
aaaaaagcatacaat

SEQ ID NO: 32449 - DNA, 15 bp, Homo sapiens
aaaaagcatacaatt

SEQ ID NO: 32450 - DNA, 15 bp, Homo sapiens
aaaagcatacaattc

SEQ ID NO: 32451 - DNA, 15 bp, Homo sapiens
aaagcatacaattct

SEQ ID NO: 32452 - DNA, 15 bp, Homo sapiens
aagcatacaattcta

SEQ ID NO: 32453 - DNA, 15 bp, Homo sapiens
agcatacaattctat

SEQ ID NO: 32454 - DNA, 15 bp, Homo sapiens
gcatacaattctatt

SEQ ID NO: 32455 - DNA, 15 bp, Homo sapiens
catacaattctattc

SEQ ID NO: 32456 - DNA, 15 bp, Homo sapiens
atacaattctattct

SEQ ID NO: 32457 - DNA, 15 bp, Homo sapiens
tacaattctattctt

SEQ ID NO: 32458 - DNA, 15 bp, Homo sapiens
acaattctattcttc

SEQ ID NO: 32459 - DNA, 15 bp, Homo sapiens
caattctattcttcc

SEQ ID NO: 32460 - DNA, 15 bp, Homo sapiens
aattctattcttcct

SEQ ID NO: 32461 - DNA, 15 bp, Homo sapiens
attctattcttcctg

SEQ ID NO: 32462 - DNA, 15 bp, Homo sapiens
ttctattcttcctga

SEQ ID NO: 32463 - DNA, 15 bp, Homo sapiens
tctattcttcctgaa

SEQ ID NO: 32464 - DNA, 15 bp, Homo sapiens
ctattcttcctgaag

SEQ ID NO: 32465 - DNA, 15 bp, Homo sapiens
tattcttcctgaagg

SEQ ID NO: 32466 - DNA, 15 bp, Homo sapiens
attcttcctgaagga

SEQ ID NO: 32467 - DNA, 15 bp, Homo sapiens
ttcttcctgaaggaa

SEQ ID NO: 32468 - DNA, 15 bp, Homo sapiens
tcttcctgaaggaat

SEQ ID NO: 32469 - DNA, 15 bp, Homo sapiens
cttcctgaaggaatg

SEQ ID NO: 32470 - DNA, 15 bp, Homo sapiens
ttcctgaaggaatgt

SEQ ID NO: 32471 - DNA, 15 bp, Homo sapiens
tcctgaaggaatgtt

SEQ ID NO: 32472 - DNA, 15 bp, Homo sapiens
cctgaaggaatgtta

SEQ ID NO: 32473 - DNA, 15 bp, Homo sapiens
ctgaaggaatgttac

SEQ ID NO: 32474 - DNA, 15 bp, Homo sapiens
tgaaggaatgttaca

SEQ ID NO: 32475 - DNA, 15 bp, Homo sapiens
gaaggaatgttacaa

SEQ ID NO: 32476 - DNA, 15 bp, Homo sapiens
aaggaatgttacaaa

SEQ ID NO: 32477 - DNA, 15 bp, Homo sapiens
aggaatgttacaaaa

SEQ ID NO: 32478 - DNA, 15 bp, Homo sapiens
ggaatgttacaaaat

SEQ ID NO: 32479 - DNA, 15 bp, Homo sapiens
gaatgttacaaaatg

SEQ ID NO: 32480 - DNA, 15 bp, Homo sapiens
aatgttacaaaatgc

SEQ ID NO: 32481 - DNA, 15 bp, Homo sapiens
atgttacaaaatgcc

SEQ ID NO: 32482 - DNA, 15 bp, Homo sapiens
tgttacaaaatgccc

SEQ ID NO: 32483 - DNA, 15 bp, Homo sapiens
gttacaaaatgccca

SEQ ID NO: 32484 - DNA, 15 bp, Homo sapiens
ttacaaaatgcccac

SEQ ID NO: 32485 - DNA, 15 bp, Homo sapiens
tacaaaatgcccact

SEQ ID NO: 32486 - DNA, 15 bp, Homo sapiens
acaaaatgcccactt

SEQ ID NO: 32487 - DNA, 15 bp, Homo sapiens
caaaatgcccacttt

SEQ ID NO: 32488 - DNA, 15 bp, Homo sapiens
aaaatgcccactttt

SEQ ID NO: 32489 - DNA, 15 bp, Homo sapiens
aaatgcccacttttt

SEQ ID NO: 32490 - DNA, 15 bp, Homo sapiens
aatgcccactttttt

SEQ ID NO: 32491 - DNA, 15 bp, Homo sapiens
atgcccactttttta

SEQ ID NO: 32492 - DNA, 15 bp, Homo sapiens
tgcccacttttttat

SEQ ID NO: 32493 - DNA, 15 bp, Homo sapiens
gcccacttttttata

SEQ ID NO: 32494 - DNA, 15 bp, Homo sapiens
cccacttttttatat

SEQ ID NO: 32495 - DNA, 15 bp, Homo sapiens
ccacttttttatata

SEQ ID NO: 32496 - DNA, 15 bp, Homo sapiens
cacttttttatatag

SEQ ID NO: 32497 - DNA, 15 bp, Homo sapiens
acttttttatatagg

SEQ ID NO: 32498 - DNA, 15 bp, Homo sapiens
cttttttatataggg

SEQ ID NO: 32499 - DNA, 15 bp, Homo sapiens
ttttttatatagggt

SEQ ID NO: 32500 - DNA, 15 bp, Homo sapiens
tttttatatagggtc

SEQ ID NO: 32501 - DNA, 15 bp, Homo sapiens
ttttatatagggtca

SEQ ID NO: 32502 - DNA, 15 bp, Homo sapiens
tttatatagggtcaa

SEQ ID NO: 32503 - DNA, 15 bp, Homo sapiens
ttatatagggtcaat

SEQ ID NO: 32504 - DNA, 15 bp, Homo sapiens
tatatagggtcaata

SEQ ID NO: 32505 - DNA, 15 bp, Homo sapiens
atatagggtcaatat

SEQ ID NO: 32506 - DNA, 15 bp, Homo sapiens
tatagggtcaatatg

SEQ ID NO: 32507 - DNA, 15 bp, Homo sapiens
atagggtcaatatgc

SEQ ID NO: 32508 - DNA, 15 bp, Homo sapiens
tagggtcaatatgcc

SEQ ID NO: 32509 - DNA, 15 bp, Homo sapiens
agggtcaatatgcca

SEQ ID NO: 32510 - DNA, 15 bp, Homo sapiens
gggtcaatatgccaa

SEQ ID NO: 32511 - DNA, 15 bp, Homo sapiens
ggtcaatatgccaaa

SEQ ID NO: 32512 - DNA, 15 bp, Homo sapiens
gtcaatatgccaaat

SEQ ID NO: 32513 - DNA, 15 bp, Homo sapiens
tcaatatgccaaatt

SEQ ID NO: 32514 - DNA, 15 bp, Homo sapiens
caatatgccaaatta

SEQ ID NO: 32515 - DNA, 15 bp, Homo sapiens
aatatgccaaattac

SEQ ID NO: 32516 - DNA, 15 bp, Homo sapiens
atatgccaaattact

SEQ ID NO: 32517 - DNA, 15 bp, Homo sapiens
tatgccaaattactt

SEQ ID NO: 32518 - DNA, 15 bp, Homo sapiens
atgccaaattactta

SEQ ID NO: 32519 - DNA, 15 bp, Homo sapiens
tgccaaattacttat

SEQ ID NO: 32520 - DNA, 15 bp, Homo sapiens
gccaaattacttata

SEQ ID NO: 32521 - DNA, 15 bp, Homo sapiens
ccaaattacttatat

SEQ ID NO: 32522 - DNA, 15 bp, Homo sapiens
caaattacttatatt

SEQ ID NO: 32523 - DNA, 15 bp, Homo sapiens
aaattacttatattt

SEQ ID NO: 32524 - DNA, 15 bp, Homo sapiens
aattacttatatttt

SEQ ID NO: 32525 - DNA, 15 bp, Homo sapiens
attacttatattttt

SEQ ID NO: 32526 - DNA, 15 bp, Homo sapiens
ttacttatatttttc

SEQ ID NO: 32527 - DNA, 15 bp, Homo sapiens
tacttatatttttca

SEQ ID NO: 32528 - DNA, 15 bp, Homo sapiens
acttatatttttcaa

SEQ ID NO: 32529 - DNA, 15 bp, Homo sapiens
cttatatttttcaat

SEQ ID NO: 32530 - DNA, 15 bp, Homo sapiens
ttatatttttcaatc

SEQ ID NO: 32531 - DNA, 15 bp, Homo sapiens
tatatttttcaatcc

SEQ ID NO: 32532 - DNA, 15 bp, Homo sapiens
atatttttcaatcca

SEQ ID NO: 32533 - DNA, 15 bp, Homo sapiens
tatttttcaatccat

SEQ ID NO: 32534 - DNA, 15 bp, Homo sapiens
atttttcaatccatc

SEQ ID NO: 32535 - DNA, 15 bp, Homo sapiens
tttttcaatccatca

SEQ ID NO: 32536 - DNA, 15 bp, Homo sapiens
ttttcaatccatcat

SEQ ID NO: 32537 - DNA, 15 bp, Homo sapiens
tttcaatccatcatc

SEQ ID NO: 32538 - DNA, 15 bp, Homo sapiens
ttcaatccatcatct

SEQ ID NO: 32539 - DNA, 15 bp, Homo sapiens
tcaatccatcatctt

SEQ ID NO: 32540 - DNA, 15 bp, Homo sapiens
caatccatcatcttc

SEQ ID NO: 32541 - DNA, 15 bp, Homo sapiens
aatccatcatcttct

SEQ ID NO: 32542 - DNA, 15 bp, Homo sapiens
atccatcatcttcta

SEQ ID NO: 32543 - DNA, 15 bp, Homo sapiens
tccatcatcttctaa

SEQ ID NO: 32544 - DNA, 15 bp, Homo sapiens
ccatcatcttctaac

SEQ ID NO: 32545 - DNA, 15 bp, Homo sapiens
catcatcttctaaca

SEQ ID NO: 32546 - DNA, 15 bp, Homo sapiens
atcatcttctaacat

SEQ ID NO: 32547 - DNA, 15 bp, Homo sapiens
tcatcttctaacatt

SEQ ID NO: 32548 - DNA, 15 bp, Homo sapiens
catcttctaacattt

SEQ ID NO: 32549 - DNA, 15 bp, Homo sapiens
atcttctaacatttg

SEQ ID NO: 32550 - DNA, 15 bp, Homo sapiens
tcttctaacatttgt

SEQ ID NO: 32551 - DNA, 15 bp, Homo sapiens
cttctaacatttgtc

SEQ ID NO: 32552 - DNA, 15 bp, Homo sapiens
ttctaacatttgtca

SEQ ID NO: 32553 - DNA, 15 bp, Homo sapiens
tctaacatttgtcac

SEQ ID NO: 32554 - DNA, 15 bp, Homo sapiens
ctaacatttgtcact

SEQ ID NO: 32555 - DNA, 15 bp, Homo sapiens
taacatttgtcactt

SEQ ID NO: 32556 - DNA, 15 bp, Homo sapiens
aacatttgtcactta

SEQ ID NO: 32557 - DNA, 15 bp, Homo sapiens
acatttgtcacttaa

SEQ ID NO: 32558 - DNA, 15 bp, Homo sapiens
catttgtcacttaaa

SEQ ID NO: 32559 - DNA, 15 bp, Homo sapiens
atttgtcacttaaat

SEQ ID NO: 32560 - DNA, 15 bp, Homo sapiens
tttgtcacttaaatt

SEQ ID NO: 32561 - DNA, 15 bp, Homo sapiens
ttgtcacttaaattt

SEQ ID NO: 32562 - DNA, 15 bp, Homo sapiens
tgtcacttaaatttt

SEQ ID NO: 32563 - DNA, 15 bp, Homo sapiens
gtcacttaaattttt

SEQ ID NO: 32564 - DNA, 15 bp, Homo sapiens
tcacttaaatttttc

SEQ ID NO: 32565 - DNA, 15 bp, Homo sapiens
cacttaaatttttct

SEQ ID NO: 32566 - DNA, 15 bp, Homo sapiens
acttaaatttttctt

SEQ ID NO: 32567 - DNA, 15 bp, Homo sapiens
cttaaatttttctta

SEQ ID NO: 32568 - DNA, 15 bp, Homo sapiens
ttaaatttttcttaa

SEQ ID NO: 32569 - DNA, 15 bp, Homo sapiens
taaatttttcttaaa

SEQ ID NO: 32570 - DNA, 15 bp, Homo sapiens
aaatttttcttaaag

SEQ ID NO: 32571 - DNA, 15 bp, Homo sapiens
aatttttcttaaagt

SEQ ID NO: 32572 - DNA, 15 bp, Homo sapiens
atttttcttaaagta

SEQ ID NO: 32573 - DNA, 15 bp, Homo sapiens
tttttcttaaagtac

SEQ ID NO: 32574 - DNA, 15 bp, Homo sapiens
ttttcttaaagtaca

SEQ ID NO: 32575 - DNA, 15 bp, Homo sapiens
tttcttaaagtacaa

SEQ ID NO: 32576 - DNA, 15 bp, Homo sapiens
ttcttaaagtacaaa

SEQ ID NO: 32577 - DNA, 15 bp, Homo sapiens
tcttaaagtacaaat

SEQ ID NO: 32578 - DNA, 15 bp, Homo sapiens
cttaaagtacaaatg

SEQ ID NO: 32579 - DNA, 15 bp, Homo sapiens
ttaaagtacaaatgt

SEQ ID NO: 32580 - DNA, 15 bp, Homo sapiens
taaagtacaaatgtt

SEQ ID NO: 32581 - DNA, 15 bp, Homo sapiens
aaagtacaaatgttc

SEQ ID NO: 32582 - DNA, 15 bp, Homo sapiens
aagtacaaatgttcc

SEQ ID NO: 32583 - DNA, 15 bp, Homo sapiens
agtacaaatgttcct

SEQ ID NO: 32584 - DNA, 15 bp, Homo sapiens
gtacaaatgttcctg

SEQ ID NO: 32585 - DNA, 15 bp, Homo sapiens
tacaaatgttcctgt

SEQ ID NO: 32586 - DNA, 15 bp, Homo sapiens
acaaatgttcctgta

SEQ ID NO: 32587 - DNA, 15 bp, Homo sapiens
caaatgttcctgtaa

SEQ ID NO: 32588 - DNA, 15 bp, Homo sapiens
aaatgttcctgtaag

SEQ ID NO: 32589 - DNA, 15 bp, Homo sapiens
aatgttcctgtaagt

SEQ ID NO: 32590 - DNA, 15 bp, Homo sapiens
atgttcctgtaagtt

SEQ ID NO: 32591 - DNA, 15 bp, Homo sapiens
tgttcctgtaagttg

SEQ ID NO: 32592 - DNA, 15 bp, Homo sapiens
gttcctgtaagttgt

SEQ ID NO: 32593 - DNA, 15 bp, Homo sapiens
ttcctgtaagttgta

SEQ ID NO: 32594 - DNA, 15 bp, Homo sapiens
tcctgtaagttgtaa

SEQ ID NO: 32595 - DNA, 15 bp, Homo sapiens
cctgtaagttgtaac

SEQ ID NO: 32596 - DNA, 15 bp, Homo sapiens
ctgtaagttgtaaca

SEQ ID NO: 32597 - DNA, 15 bp, Homo sapiens
tgtaagttgtaacag

SEQ ID NO: 32598 - DNA, 15 bp, Homo sapiens
gtaagttgtaacaga

SEQ ID NO: 32599 - DNA, 15 bp, Homo sapiens
taagttgtaacagaa

SEQ ID NO: 32600 - DNA, 15 bp, Homo sapiens
aagttgtaacagaaa

SEQ ID NO: 32601 - DNA, 15 bp, Homo sapiens
agttgtaacagaaaa

SEQ ID NO: 32602 - DNA, 15 bp, Homo sapiens
gttgtaacagaaaat

SEQ ID NO: 32603 - DNA, 15 bp, Homo sapiens
ttgtaacagaaaatg

SEQ ID NO: 32604 - DNA, 15 bp, Homo sapiens
tgtaacagaaaatga

SEQ ID NO: 32605 - DNA, 15 bp, Homo sapiens
gtaacagaaaatgaa

SEQ ID NO: 32606 - DNA, 15 bp, Homo sapiens
taacagaaaatgaac

SEQ ID NO: 32607 - DNA, 15 bp, Homo sapiens
aacagaaaatgaacc

SEQ ID NO: 32608 - DNA, 15 bp, Homo sapiens
acagaaaatgaaccc

SEQ ID NO: 32609 - DNA, 15 bp, Homo sapiens
cagaaaatgaacccc

SEQ ID NO: 32610 - DNA, 15 bp, Homo sapiens
agaaaatgaacccca

SEQ ID NO: 32611 - DNA, 15 bp, Homo sapiens
gaaaatgaaccccaa

SEQ ID NO: 32612 - DNA, 15 bp, Homo sapiens
aaaatgaaccccaac

SEQ ID NO: 32613 - DNA, 15 bp, Homo sapiens
aaatgaaccccaact

SEQ ID NO: 32614 - DNA, 15 bp, Homo sapiens
aatgaaccccaactc

SEQ ID NO: 32615 - DNA, 15 bp, Homo sapiens
atgaaccccaactct

SEQ ID NO: 32616 - DNA, 15 bp, Homo sapiens
tgaaccccaactctt

SEQ ID NO: 32617 - DNA, 15 bp, Homo sapiens
gaaccccaactcttt

SEQ ID NO: 32618 - DNA, 15 bp, Homo sapiens
aaccccaactctttc

SEQ ID NO: 32619 - DNA, 15 bp, Homo sapiens
accccaactctttca

SEQ ID NO: 32620 - DNA, 15 bp, Homo sapiens
ccccaactctttcag

SEQ ID NO: 32621 - DNA, 15 bp, Homo sapiens
cccaactctttcagt

SEQ ID NO: 32622 - DNA, 15 bp, Homo sapiens
ccaactctttcagtc

SEQ ID NO: 32623 - DNA, 15 bp, Homo sapiens
caactctttcagtct

SEQ ID NO: 32624 - DNA, 15 bp, Homo sapiens
aactctttcagtctt

SEQ ID NO: 32625 - DNA, 15 bp, Homo sapiens
actctttcagtcttt

SEQ ID NO: 32626 - DNA, 15 bp, Homo sapiens
ctctttcagtcttta

SEQ ID NO: 32627 - DNA, 15 bp, Homo sapiens
tctttcagtctttaa

SEQ ID NO: 32628 - DNA, 15 bp, Homo sapiens
ctttcagtctttaag

SEQ ID NO: 32629 - DNA, 15 bp, Homo sapiens
tttcagtctttaaga

SEQ ID NO: 32630 - DNA, 15 bp, Homo sapiens
ttcagtctttaagac

SEQ ID NO: 32631 - DNA, 15 bp, Homo sapiens
tcagtctttaagacc

SEQ ID NO: 32632 - DNA, 15 bp, Homo sapiens
cagtctttaagacct

SEQ ID NO: 32633 - DNA, 15 bp, Homo sapiens
agtctttaagacctc

SEQ ID NO: 32634 - DNA, 15 bp, Homo sapiens
gtctttaagacctca

SEQ ID NO: 32635 - DNA, 15 bp, Homo sapiens
tctttaagacctcag

SEQ ID NO: 32636 - DNA, 15 bp, Homo sapiens
ctttaagacctcagt

SEQ ID NO: 32637 - DNA, 15 bp, Homo sapiens
tttaagacctcagtc

SEQ ID NO: 32638 - DNA, 15 bp, Homo sapiens
ttaagacctcagtca

SEQ ID NO: 32639 - DNA, 15 bp, Homo sapiens
taagacctcagtcac

SEQ ID NO: 32640 - DNA, 15 bp, Homo sapiens
aagacctcagtcaca

SEQ ID NO: 32641 - DNA, 15 bp, Homo sapiens
agacctcagtcacag

SEQ ID NO: 32642 - DNA, 15 bp, Homo sapiens
gacctcagtcacagt

SEQ ID NO: 32643 - DNA, 15 bp, Homo sapiens
acctcagtcacagtc

SEQ ID NO: 32644 - DNA, 15 bp, Homo sapiens
cctcagtcacagtcc

SEQ ID NO: 32645 - DNA, 15 bp, Homo sapiens
ctcagtcacagtccc

SEQ ID NO: 32646 - DNA, 15 bp, Homo sapiens
tcagtcacagtccca

SEQ ID NO: 32647 - DNA, 15 bp, Homo sapiens
cagtcacagtcccac

SEQ ID NO: 32648 - DNA, 15 bp, Homo sapiens
agtcacagtcccaca

SEQ ID NO: 32649 - DNA, 15 bp, Homo sapiens
gtcacagtcccacac

SEQ ID NO: 32650 - DNA, 15 bp, Homo sapiens
tcacagtcccacact

SEQ ID NO: 32651 - DNA, 15 bp, Homo sapiens
cacagtcccacacta

SEQ ID NO: 32652 - DNA, 15 bp, Homo sapiens
acagtcccacactaa

SEQ ID NO: 32653 - DNA, 15 bp, Homo sapiens
cagtcccacactaat

SEQ ID NO: 32654 - DNA, 15 bp, Homo sapiens
agtcccacactaata

SEQ ID NO: 32655 - DNA, 15 bp, Homo sapiens
gtcccacactaatag

SEQ ID NO: 32656 - DNA, 15 bp, Homo sapiens
tcccacactaatagc

SEQ ID NO: 32657 - DNA, 15 bp, Homo sapiens
cccacactaatagct

SEQ ID NO: 32658 - DNA, 15 bp, Homo sapiens
ccacactaatagctg

SEQ ID NO: 32659 - DNA, 15 bp, Homo sapiens
cacactaatagctgc

SEQ ID NO: 32660 - DNA, 15 bp, Homo sapiens
acactaatagctgcc

SEQ ID NO: 32661 - DNA, 15 bp, Homo sapiens
cactaatagctgcct

SEQ ID NO: 32662 - DNA, 15 bp, Homo sapiens
actaatagctgcctt

SEQ ID NO: 32663 - DNA, 15 bp, Homo sapiens
ctaatagctgccttt

SEQ ID NO: 32664 - DNA, 15 bp, Homo sapiens
taatagctgcctttt

SEQ ID NO: 32665 - DNA, 15 bp, Homo sapiens
aatagctgcctttta

SEQ ID NO: 32666 - DNA, 15 bp, Homo sapiens
atagctgccttttag

SEQ ID NO: 32667 - DNA, 15 bp, Homo sapiens
tagctgccttttagt

SEQ ID NO: 32668 - DNA, 15 bp, Homo sapiens
agctgccttttagta

SEQ ID NO: 32669 - DNA, 15 bp, Homo sapiens
gctgccttttagtaa

SEQ ID NO: 32670 - DNA, 15 bp, Homo sapiens
ctgccttttagtaaa

SEQ ID NO: 32671 - DNA, 15 bp, Homo sapiens
tgccttttagtaaaa

SEQ ID NO: 32672 - DNA, 15 bp, Homo sapiens
gccttttagtaaaat

SEQ ID NO: 32673 - DNA, 15 bp, Homo sapiens
ccttttagtaaaata

SEQ ID NO: 32674 - DNA, 15 bp, Homo sapiens
cttttagtaaaatag

SEQ ID NO: 32675 - DNA, 15 bp, Homo sapiens
ttttagtaaaatagt

SEQ ID NO: 32676 - DNA, 15 bp, Homo sapiens
tttagtaaaatagtg

SEQ ID NO: 32677 - DNA, 15 bp, Homo sapiens
ttagtaaaatagtga

SEQ ID NO: 32678 - DNA, 15 bp, Homo sapiens
tagtaaaatagtgac

SEQ ID NO: 32679 - DNA, 15 bp, Homo sapiens
agtaaaatagtgaca

SEQ ID NO: 32680 - DNA, 15 bp, Homo sapiens
gtaaaatagtgacat

SEQ ID NO: 32681 - DNA, 15 bp, Homo sapiens
taaaatagtgacatc

SEQ ID NO: 32682 - DNA, 15 bp, Homo sapiens
aaaatagtgacatcc

SEQ ID NO: 32683 - DNA, 15 bp, Homo sapiens
aaatagtgacatcca

SEQ ID NO: 32684 - DNA, 15 bp, Homo sapiens
aatagtgacatccag

SEQ ID NO: 32685 - DNA, 15 bp, Homo sapiens
atagtgacatccagt

SEQ ID NO: 32686 - DNA, 15 bp, Homo sapiens
tagtgacatccagtg

SEQ ID NO: 32687 - DNA, 15 bp, Homo sapiens
agtgacatccagtgg

SEQ ID NO: 32688 - DNA, 15 bp, Homo sapiens
gtgacatccagtgga

SEQ ID NO: 32689 - DNA, 15 bp, Homo sapiens
tgacatccagtggac

SEQ ID NO: 32690 - DNA, 15 bp, Homo sapiens
gacatccagtggaca

SEQ ID NO: 32691 - DNA, 15 bp, Homo sapiens
acatccagtggacaa

SEQ ID NO: 32692 - DNA, 15 bp, Homo sapiens
catccagtggacaaa

SEQ ID NO: 32693 - DNA, 15 bp, Homo sapiens
atccagtggacaaat

SEQ ID NO: 32694 - DNA, 15 bp, Homo sapiens
tccagtggacaaatg

SEQ ID NO: 32695 - DNA, 15 bp, Homo sapiens
ccagtggacaaatga

SEQ ID NO: 32696 - DNA, 15 bp, Homo sapiens
cagtggacaaatgaa

SEQ ID NO: 32697 - DNA, 15 bp, Homo sapiens
agtggacaaatgaaa

SEQ ID NO: 32698 - DNA, 15 bp, Homo sapiens
gtggacaaatgaaat

SEQ ID NO: 32699 - DNA, 15 bp, Homo sapiens
tggacaaatgaaata

SEQ ID NO: 32700 - DNA, 15 bp, Homo sapiens
ggacaaatgaaatat

SEQ ID NO: 32701 - DNA, 15 bp, Homo sapiens
gacaaatgaaatatt

SEQ ID NO: 32702 - DNA, 15 bp, Homo sapiens
acaaatgaaatattt

SEQ ID NO: 32703 - DNA, 15 bp, Homo sapiens
caaatgaaatatttc

SEQ ID NO: 32704 - DNA, 15 bp, Homo sapiens
aaatgaaatatttct

SEQ ID NO: 32705 - DNA, 15 bp, Homo sapiens
aatgaaatatttctc

SEQ ID NO: 32706 - DNA, 15 bp, Homo sapiens
atgaaatatttctca

SEQ ID NO: 32707 - DNA, 15 bp, Homo sapiens
tgaaatatttctcaa

SEQ ID NO: 32708 - DNA, 15 bp, Homo sapiens
gaaatatttctcaaa

SEQ ID NO: 32709 - DNA, 15 bp, Homo sapiens
aaatatttctcaaat

SEQ ID NO: 32710 - DNA, 15 bp, Homo sapiens
aatatttctcaaatt

SEQ ID NO: 32711 - DNA, 15 bp, Homo sapiens
atatttctcaaattc

SEQ ID NO: 32712 - DNA, 15 bp, Homo sapiens
tatttctcaaattcc

SEQ ID NO: 32713 - DNA, 15 bp, Homo sapiens
atttctcaaattccc

SEQ ID NO: 32714 - DNA, 15 bp, Homo sapiens
tttctcaaattccca

SEQ ID NO: 32715 - DNA, 15 bp, Homo sapiens
ttctcaaattcccat

SEQ ID NO: 32716 - DNA, 15 bp, Homo sapiens
tctcaaattcccata

SEQ ID NO: 32717 - DNA, 15 bp, Homo sapiens
ctcaaattcccatat

SEQ ID NO: 32718 - DNA, 15 bp, Homo sapiens
tcaaattcccatatt

SEQ ID NO: 32719 - DNA, 15 bp, Homo sapiens
caaattcccatattt

SEQ ID NO: 32720 - DNA, 15 bp, Homo sapiens
aaattcccatatttg

SEQ ID NO: 32721 - DNA, 15 bp, Homo sapiens
aattcccatatttga

SEQ ID NO: 32722 - DNA, 15 bp, Homo sapiens
attcccatatttgaa

SEQ ID NO: 32723 - DNA, 15 bp, Homo sapiens
ttcccatatttgaat

SEQ ID NO: 32724 - DNA, 15 bp, Homo sapiens
tcccatatttgaatc

SEQ ID NO: 32725 - DNA, 15 bp, Homo sapiens
cccatatttgaatca

SEQ ID NO: 32726 - DNA, 15 bp, Homo sapiens
ccatatttgaatcat

SEQ ID NO: 32727 - DNA, 15 bp, Homo sapiens
catatttgaatcata

SEQ ID NO: 32728 - DNA, 15 bp, Homo sapiens
atatttgaatcataa

SEQ ID NO: 32729 - DNA, 15 bp, Homo sapiens
tatttgaatcataaa

SEQ ID NO: 32730 - DNA, 15 bp, Homo sapiens
atttgaatcataaac

SEQ ID NO: 32731 - DNA, 15 bp, Homo sapiens
tttgaatcataaaca

SEQ ID NO: 32732 - DNA, 15 bp, Homo sapiens
ttgaatcataaacaa

SEQ ID NO: 32733 - DNA, 15 bp, Homo sapiens
tgaatcataaacaaa

SEQ ID NO: 32734 - DNA, 15 bp, Homo sapiens
gaatcataaacaaaa

SEQ ID NO: 32735 - DNA, 15 bp, Homo sapiens
aatcataaacaaaag

SEQ ID NO: 32736 - DNA, 15 bp, Homo sapiens
atcataaacaaaagt

SEQ ID NO: 32737 - DNA, 15 bp, Homo sapiens
tcataaacaaaagtt

SEQ ID NO: 32738 - DNA, 15 bp, Homo sapiens
cataaacaaaagttg

SEQ ID NO: 32739 - DNA, 15 bp, Homo sapiens
ataaacaaaagttgc

SEQ ID NO: 32740 - DNA, 15 bp, Homo sapiens
taaacaaaagttgcc

SEQ ID NO: 32741 - DNA, 15 bp, Homo sapiens
aaacaaaagttgcct

SEQ ID NO: 32742 - DNA, 15 bp, Homo sapiens
aacaaaagttgcctc

SEQ ID NO: 32743 - DNA, 15 bp, Homo sapiens
acaaaagttgcctct

SEQ ID NO: 32744 - DNA, 15 bp, Homo sapiens
caaaagttgcctctt

SEQ ID NO: 32745 - DNA, 15 bp, Homo sapiens
aaaagttgcctcttt

SEQ ID NO: 32746 - DNA, 15 bp, Homo sapiens
aaagttgcctcttta

SEQ ID NO: 32747 - DNA, 15 bp, Homo sapiens
aagttgcctctttaa

SEQ ID NO: 32748 - DNA, 15 bp, Homo sapiens
agttgcctctttaaa

SEQ ID NO: 32749 - DNA, 15 bp, Homo sapiens
gttgcctctttaaat

SEQ ID NO: 32750 - DNA, 15 bp, Homo sapiens
ttgcctctttaaatc

SEQ ID NO: 32751 - DNA, 15 bp, Homo sapiens
tgcctctttaaatcc

SEQ ID NO: 32752 - DNA, 15 bp, Homo sapiens
gcctctttaaatcca

SEQ ID NO: 32753 - DNA, 15 bp, Homo sapiens
cctctttaaatccaa

SEQ ID NO: 32754 - DNA, 15 bp, Homo sapiens
ctctttaaatccaac

SEQ ID NO: 32755 - DNA, 15 bp, Homo sapiens
tctttaaatccaaca

SEQ ID NO: 32756 - DNA, 15 bp, Homo sapiens
ctttaaatccaacaa

SEQ ID NO: 32757 - DNA, 15 bp, Homo sapiens
tttaaatccaacaat

SEQ ID NO: 32758 - DNA, 15 bp, Homo sapiens
ttaaatccaacaatt

SEQ ID NO: 32759 - DNA, 15 bp, Homo sapiens
taaatccaacaattt

SEQ ID NO: 32760 - DNA, 15 bp, Homo sapiens
aaatccaacaatttt

SEQ ID NO: 32761 - DNA, 15 bp, Homo sapiens
aatccaacaatttta

SEQ ID NO: 32762 - DNA, 15 bp, Homo sapiens
atccaacaattttag

SEQ ID NO: 32763 - DNA, 15 bp, Homo sapiens
tccaacaattttagt

SEQ ID NO: 32764 - DNA, 15 bp, Homo sapiens
ccaacaattttagta

SEQ ID NO: 32765 - DNA, 15 bp, Homo sapiens
caacaattttagtat

SEQ ID NO: 32766 - DNA, 15 bp, Homo sapiens
aacaattttagtatg

SEQ ID NO: 32767 - DNA, 15 bp, Homo sapiens
acaattttagtatga

SEQ ID NO: 32768 - DNA, 15 bp, Homo sapiens
caattttagtatgag

SEQ ID NO: 32769 - DNA, 15 bp, Homo sapiens
aattttagtatgagt

SEQ ID NO: 32770 - DNA, 15 bp, Homo sapiens
attttagtatgagtt

SEQ ID NO: 32771 - DNA, 15 bp, Homo sapiens
ttttagtatgagttc

SEQ ID NO: 32772 - DNA, 15 bp, Homo sapiens
tttagtatgagttcc

SEQ ID NO: 32773 - DNA, 15 bp, Homo sapiens
ttagtatgagttcct

SEQ ID NO: 32774 - DNA, 15 bp, Homo sapiens
tagtatgagttccta

SEQ ID NO: 32775 - DNA, 15 bp, Homo sapiens
agtatgagttcctac

SEQ ID NO: 32776 - DNA, 15 bp, Homo sapiens
gtatgagttcctact

SEQ ID NO: 32777 - DNA, 15 bp, Homo sapiens
tatgagttcctactt

SEQ ID NO: 32778 - DNA, 15 bp, Homo sapiens
atgagttcctactta

SEQ ID NO: 32779 - DNA, 15 bp, Homo sapiens
tgagttcctacttat

SEQ ID NO: 32780 - DNA, 15 bp, Homo sapiens
gagttcctacttatt

SEQ ID NO: 32781 - DNA, 15 bp, Homo sapiens
agttcctacttattt

SEQ ID NO: 32782 - DNA, 15 bp, Homo sapiens
gttcctacttatttt

SEQ ID NO: 32783 - DNA, 15 bp, Homo sapiens
ttcctacttattttg

SEQ ID NO: 32784 - DNA, 15 bp, Homo sapiens
tcctacttattttga

SEQ ID NO: 32785 - DNA, 15 bp, Homo sapiens
cctacttattttgat

SEQ ID NO: 32786 - DNA, 15 bp, Homo sapiens
ctacttattttgatg

SEQ ID NO: 32787 - DNA, 15 bp, Homo sapiens
tacttattttgatgg

SEQ ID NO: 32788 - DNA, 15 bp, Homo sapiens
acttattttgatgga

SEQ ID NO: 32789 - DNA, 15 bp, Homo sapiens
cttattttgatggaa

SEQ ID NO: 32790 - DNA, 15 bp, Homo sapiens
ttattttgatggaat

SEQ ID NO: 32791 - DNA, 15 bp, Homo sapiens
tattttgatggaatc

SEQ ID NO: 32792 - DNA, 15 bp, Homo sapiens
attttgatggaatct

SEQ ID NO: 32793 - DNA, 15 bp, Homo sapiens
ttttgatggaatcta

SEQ ID NO: 32794 - DNA, 15 bp, Homo sapiens
tttgatggaatctac

SEQ ID NO: 32795 - DNA, 15 bp, Homo sapiens
ttgatggaatctaca

SEQ ID NO: 32796 - DNA, 15 bp, Homo sapiens
tgatggaatctacag

SEQ ID NO: 32797 - DNA, 15 bp, Homo sapiens
gatggaatctacaga

SEQ ID NO: 32798 - DNA, 15 bp, Homo sapiens
atggaatctacagat

SEQ ID NO: 32799 - DNA, 15 bp, Homo sapiens
tggaatctacagatt

SEQ ID NO: 32800 - DNA, 15 bp, Homo sapiens
ggaatctacagattc

SEQ ID NO: 32801 - DNA, 15 bp, Homo sapiens
gaatctacagattct

SEQ ID NO: 32802 - DNA, 15 bp, Homo sapiens
aatctacagattctc

SEQ ID NO: 32803 - DNA, 15 bp, Homo sapiens
atctacagattctca

SEQ ID NO: 32804 - DNA, 15 bp, Homo sapiens
tctacagattctcat

SEQ ID NO: 32805 - DNA, 15 bp, Homo sapiens
ctacagattctcatg

SEQ ID NO: 32806 - DNA, 15 bp, Homo sapiens
tacagattctcatga

SEQ ID NO: 32807 - DNA, 15 bp, Homo sapiens
acagattctcatgaa

SEQ ID NO: 32808 - DNA, 15 bp, Homo sapiens
cagattctcatgaat

SEQ ID NO: 32809 - DNA, 15 bp, Homo sapiens
agattctcatgaata

SEQ ID NO: 32810 - DNA, 15 bp, Homo sapiens
gattctcatgaatac

SEQ ID NO: 32811 - DNA, 15 bp, Homo sapiens
attctcatgaatact

SEQ ID NO: 32812 - DNA, 15 bp, Homo sapiens
ttctcatgaatactt

SEQ ID NO: 32813 - DNA, 15 bp, Homo sapiens
tctcatgaatacttc

SEQ ID NO: 32814 - DNA, 15 bp, Homo sapiens
ctcatgaatacttca

SEQ ID NO: 32815 - DNA, 15 bp, Homo sapiens
tcatgaatacttcac

SEQ ID NO: 32816 - DNA, 15 bp, Homo sapiens
catgaatacttcaca

SEQ ID NO: 32817 - DNA, 15 bp, Homo sapiens
atgaatacttcacat

SEQ ID NO: 32818 - DNA, 15 bp, Homo sapiens
tgaatacttcacatc

SEQ ID NO: 32819 - DNA, 15 bp, Homo sapiens
gaatacttcacatca

SEQ ID NO: 32820 - DNA, 15 bp, Homo sapiens
aatacttcacatcat

SEQ ID NO: 32821 - DNA, 15 bp, Homo sapiens
atacttcacatcata

SEQ ID NO: 32822 - DNA, 15 bp, Homo sapiens
tacttcacatcataa

SEQ ID NO: 32823 - DNA, 15 bp, Homo sapiens
acttcacatcataat

SEQ ID NO: 32824 - DNA, 15 bp, Homo sapiens
cttcacatcataatt

SEQ ID NO: 32825 - DNA, 15 bp, Homo sapiens
ttcacatcataattt

SEQ ID NO: 32826 - DNA, 15 bp, Homo sapiens
tcacatcataatttc

SEQ ID NO: 32827 - DNA, 15 bp, Homo sapiens
cacatcataatttct

SEQ ID NO: 32828 - DNA, 15 bp, Homo sapiens
acatcataatttcta

SEQ ID NO: 32829 - DNA, 15 bp, Homo sapiens
catcataatttctat

SEQ ID NO: 32830 - DNA, 15 bp, Homo sapiens
atcataatttctatg

SEQ ID NO: 32831 - DNA, 15 bp, Homo sapiens
tcataatttctatgt

SEQ ID NO: 32832 - DNA, 15 bp, Homo sapiens
cataatttctatgta

SEQ ID NO: 32833 - DNA, 15 bp, Homo sapiens
ataatttctatgtat

SEQ ID NO: 32834 - DNA, 15 bp, Homo sapiens
taatttctatgtatc

SEQ ID NO: 32835 - DNA, 15 bp, Homo sapiens
aatttctatgtatct

SEQ ID NO: 32836 - DNA, 15 bp, Homo sapiens
atttctatgtatctt

SEQ ID NO: 32837 - DNA, 15 bp, Homo sapiens
tttctatgtatctta

SEQ ID NO: 32838 - DNA, 15 bp, Homo sapiens
ttctatgtatcttaa

SEQ ID NO: 32839 - DNA, 15 bp, Homo sapiens
tctatgtatcttaaa

SEQ ID NO: 32840 - DNA, 15 bp, Homo sapiens
ctatgtatcttaaat

SEQ ID NO: 32841 - DNA, 15 bp, Homo sapiens
tatgtatcttaaata

SEQ ID NO: 32842 - DNA, 15 bp, Homo sapiens
atgtatcttaaatat

SEQ ID NO: 32843 - DNA, 15 bp, Homo sapiens
tgtatcttaaatata

SEQ ID NO: 32844 - DNA, 15 bp, Homo sapiens
gtatcttaaatatat

SEQ ID NO: 32845 - DNA, 15 bp, Homo sapiens
tatcttaaatatatc

SEQ ID NO: 32846 - DNA, 15 bp, Homo sapiens
atcttaaatatatcc

SEQ ID NO: 32847 - DNA, 15 bp, Homo sapiens
tcttaaatatatcct

SEQ ID NO: 32848 - DNA, 15 bp, Homo sapiens
cttaaatatatcctc

SEQ ID NO: 32849 - DNA, 15 bp, Homo sapiens
ttaaatatatcctct

SEQ ID NO: 32850 - DNA, 15 bp, Homo sapiens
taaatatatcctctt

SEQ ID NO: 32851 - DNA, 15 bp, Homo sapiens
aaatatatcctcttt

SEQ ID NO: 32852 - DNA, 15 bp, Homo sapiens
aatatatcctctttt

SEQ ID NO: 32853 - DNA, 15 bp, Homo sapiens
atatatcctcttttc

SEQ ID NO: 32854 - DNA, 15 bp, Homo sapiens
tatatcctcttttct

SEQ ID NO: 32855 - DNA, 15 bp, Homo sapiens
atatcctcttttctt

SEQ ID NO: 32856 - DNA, 15 bp, Homo sapiens
tatcctcttttcttc

SEQ ID NO: 32857 - DNA, 15 bp, Homo sapiens
atcctcttttcttcc

SEQ ID NO: 32858 - DNA, 15 bp, Homo sapiens
tcctcttttcttcct

SEQ ID NO: 32859 - DNA, 15 bp, Homo sapiens
cctcttttcttccta

SEQ ID NO: 32860 - DNA, 15 bp, Homo sapiens
ctcttttcttcctat

SEQ ID NO: 32861 - DNA, 15 bp, Homo sapiens
tcttttcttcctatt

SEQ ID NO: 32862 - DNA, 15 bp, Homo sapiens
cttttcttcctattt

SEQ ID NO: 32863 - DNA, 15 bp, Homo sapiens
ttttcttcctattta

SEQ ID NO: 32864 - DNA, 15 bp, Homo sapiens
tttcttcctatttaa

SEQ ID NO: 32865 - DNA, 15 bp, Homo sapiens
ttcttcctatttaaa

SEQ ID NO: 32866 - DNA, 15 bp, Homo sapiens
tcttcctatttaaaa

SEQ ID NO: 32867 - DNA, 15 bp, Homo sapiens
cttcctatttaaaat

SEQ ID NO: 32868 - DNA, 15 bp, Homo sapiens
ttcctatttaaaatc

SEQ ID NO: 32869 - DNA, 15 bp, Homo sapiens
tcctatttaaaatca

SEQ ID NO: 32870 - DNA, 15 bp, Homo sapiens
cctatttaaaatcaa

SEQ ID NO: 32871 - DNA, 15 bp, Homo sapiens
ctatttaaaatcaat

SEQ ID NO: 32872 - DNA, 15 bp, Homo sapiens
tatttaaaatcaatt

SEQ ID NO: 32873 - DNA, 15 bp, Homo sapiens
atttaaaatcaatta

SEQ ID NO: 32874 - DNA, 15 bp, Homo sapiens
tttaaaatcaattat

SEQ ID NO: 32875 - DNA, 15 bp, Homo sapiens
ttaaaatcaattatt

SEQ ID NO: 32876 - DNA, 15 bp, Homo sapiens
taaaatcaattattt

SEQ ID NO: 32877 - DNA, 15 bp, Homo sapiens
aaaatcaattattta

SEQ ID NO: 32878 - DNA, 15 bp, Homo sapiens
aaatcaattatttaa

SEQ ID NO: 32879 - DNA, 15 bp, Homo sapiens
aatcaattatttaaa

SEQ ID NO: 32880 - DNA, 15 bp, Homo sapiens
atcaattatttaaat

SEQ ID NO: 32881 - DNA, 15 bp, Homo sapiens
tcaattatttaaatt

SEQ ID NO: 32882 - DNA, 15 bp, Homo sapiens
caattatttaaattg

SEQ ID NO: 32883 - DNA, 15 bp, Homo sapiens
aattatttaaattga

SEQ ID NO: 32884 - DNA, 15 bp, Homo sapiens
attatttaaattgag

SEQ ID NO: 32885 - DNA, 15 bp, Homo sapiens
ttatttaaattgagc

SEQ ID NO: 32886 - DNA, 15 bp, Homo sapiens
tatttaaattgagct

SEQ ID NO: 32887 - DNA, 15 bp, Homo sapiens
atttaaattgagcta

SEQ ID NO: 32888 - DNA, 15 bp, Homo sapiens
tttaaattgagctag

SEQ ID NO: 32889 - DNA, 15 bp, Homo sapiens
ttaaattgagctagt

SEQ ID NO: 32890 - DNA, 15 bp, Homo sapiens
taaattgagctagta

SEQ ID NO: 32891 - DNA, 15 bp, Homo sapiens
aaattgagctagtaa

SEQ ID NO: 32892 - DNA, 15 bp, Homo sapiens
aattgagctagtaag

SEQ ID NO: 32893 - DNA, 15 bp, Homo sapiens
attgagctagtaaga

SEQ ID NO: 32894 - DNA, 15 bp, Homo sapiens
ttgagctagtaagaa

SEQ ID NO: 32895 - DNA, 15 bp, Homo sapiens
tgagctagtaagaat

SEQ ID NO: 32896 - DNA, 15 bp, Homo sapiens
gagctagtaagaatg

SEQ ID NO: 32897 - DNA, 15 bp, Homo sapiens
agctagtaagaatgt

SEQ ID NO: 32898 - DNA, 15 bp, Homo sapiens
gctagtaagaatgtc

SEQ ID NO: 32899 - DNA, 15 bp, Homo sapiens
ctagtaagaatgtct

SEQ ID NO: 32900 - DNA, 15 bp, Homo sapiens
tagtaagaatgtcta

SEQ ID NO: 32901 - DNA, 15 bp, Homo sapiens
agtaagaatgtctac

SEQ ID NO: 32902 - DNA, 15 bp, Homo sapiens
gtaagaatgtctact

SEQ ID NO: 32903 - DNA, 15 bp, Homo sapiens
taagaatgtctactc

SEQ ID NO: 32904 - DNA, 15 bp, Homo sapiens
aagaatgtctactct

SEQ ID NO: 32905 - DNA, 15 bp, Homo sapiens
agaatgtctactctt

SEQ ID NO: 32906 - DNA, 15 bp, Homo sapiens
gaatgtctactcttg

SEQ ID NO: 32907 - DNA, 15 bp, Homo sapiens
aatgtctactcttga

SEQ ID NO: 32908 - DNA, 15 bp, Homo sapiens
atgtctactcttgaa

SEQ ID NO: 32909 - DNA, 15 bp, Homo sapiens
tgtctactcttgaag

SEQ ID NO: 32910 - DNA, 15 bp, Homo sapiens
gtctactcttgaagc

SEQ ID NO: 32911 - DNA, 15 bp, Homo sapiens
tctactcttgaagct

SEQ ID NO: 32912 - DNA, 15 bp, Homo sapiens
ctactcttgaagcta

SEQ ID NO: 32913 - DNA, 15 bp, Homo sapiens
tactcttgaagctag

SEQ ID NO: 32914 - DNA, 15 bp, Homo sapiens
actcttgaagctagt

SEQ ID NO: 32915 - DNA, 15 bp, Homo sapiens
ctcttgaagctagtg

SEQ ID NO: 32916 - DNA, 15 bp, Homo sapiens
tcttgaagctagtga

SEQ ID NO: 32917 - DNA, 15 bp, Homo sapiens
cttgaagctagtgag

SEQ ID NO: 32918 - DNA, 15 bp, Homo sapiens
ttgaagctagtgagg

SEQ ID NO: 32919 - DNA, 15 bp, Homo sapiens
tgaagctagtgaggt

SEQ ID NO: 32920 - DNA, 15 bp, Homo sapiens
gaagctagtgaggtt

SEQ ID NO: 32921 - DNA, 15 bp, Homo sapiens
aagctagtgaggtta

SEQ ID NO: 32922 - DNA, 15 bp, Homo sapiens
agctagtgaggttaa

SEQ ID NO: 32923 - DNA, 15 bp, Homo sapiens
gctagtgaggttaaa

SEQ ID NO: 32924 - DNA, 15 bp, Homo sapiens
ctagtgaggttaaag

SEQ ID NO: 32925 - DNA, 15 bp, Homo sapiens
tagtgaggttaaagg

SEQ ID NO: 32926 - DNA, 15 bp, Homo sapiens
agtgaggttaaaggt

SEQ ID NO: 32927 - DNA, 15 bp, Homo sapiens
gtgaggttaaaggta

SEQ ID NO: 32928 - DNA, 15 bp, Homo sapiens
tgaggttaaaggtat

SEQ ID NO: 32929 - DNA, 15 bp, Homo sapiens
gaggttaaaggtatt

SEQ ID NO: 32930 - DNA, 15 bp, Homo sapiens
aggttaaaggtatta

SEQ ID NO: 32931 - DNA, 15 bp, Homo sapiens
ggttaaaggtattac

SEQ ID NO: 32932 - DNA, 15 bp, Homo sapiens
gttaaaggtattact

SEQ ID NO: 32933 - DNA, 15 bp, Homo sapiens
ttaaaggtattactt

SEQ ID NO: 32934 - DNA, 15 bp, Homo sapiens
taaaggtattacttt

SEQ ID NO: 32935 - DNA, 15 bp, Homo sapiens
aaaggtattactttt

SEQ ID NO: 32936 - DNA, 15 bp, Homo sapiens
aaggtattacttttc

SEQ ID NO: 32937 - DNA, 15 bp, Homo sapiens
aggtattacttttcc

SEQ ID NO: 32938 - DNA, 15 bp, Homo sapiens
ggtattacttttcct

SEQ ID NO: 32939 - DNA, 15 bp, Homo sapiens
gtattacttttcctt

SEQ ID NO: 32940 - DNA, 15 bp, Homo sapiens
tattacttttccttc

SEQ ID NO: 32941 - DNA, 15 bp, Homo sapiens
attacttttccttct

SEQ ID NO: 32942 - DNA, 15 bp, Homo sapiens
ttacttttccttctt

SEQ ID NO: 32943 - DNA, 15 bp, Homo sapiens
tacttttccttcttt

SEQ ID NO: 32944 - DNA, 15 bp, Homo sapiens
acttttccttctttg

SEQ ID NO: 32945 - DNA, 15 bp, Homo sapiens
cttttccttctttgc

SEQ ID NO: 32946 - DNA, 15 bp, Homo sapiens
ttttccttctttgct

SEQ ID NO: 32947 - DNA, 15 bp, Homo sapiens
tttccttctttgctt

SEQ ID NO: 32948 - DNA, 15 bp, Homo sapiens
ttccttctttgcttc

SEQ ID NO: 32949 - DNA, 15 bp, Homo sapiens
tccttctttgcttca

SEQ ID NO: 32950 - DNA, 15 bp, Homo sapiens
ccttctttgcttcag

SEQ ID NO: 32951 - DNA, 15 bp, Homo sapiens
cttctttgcttcagc

SEQ ID NO: 32952 - DNA, 15 bp, Homo sapiens
ttctttgcttcagct

SEQ ID NO: 32953 - DNA, 15 bp, Homo sapiens
tctttgcttcagcta

SEQ ID NO: 32954 - DNA, 15 bp, Homo sapiens
ctttgcttcagctac

SEQ ID NO: 32955 - DNA, 15 bp, Homo sapiens
tttgcttcagctact

SEQ ID NO: 32956 - DNA, 15 bp, Homo sapiens
ttgcttcagctactt

SEQ ID NO: 32957 - DNA, 15 bp, Homo sapiens
tgcttcagctacttc

SEQ ID NO: 32958 - DNA, 15 bp, Homo sapiens
gcttcagctacttcc

SEQ ID NO: 32959 - DNA, 15 bp, Homo sapiens
cttcagctacttccc

SEQ ID NO: 32960 - DNA, 15 bp, Homo sapiens
ttcagctacttccca

SEQ ID NO: 32961 - DNA, 15 bp, Homo sapiens
tcagctacttcccac

SEQ ID NO: 32962 - DNA, 15 bp, Homo sapiens
cagctacttcccacc

SEQ ID NO: 32963 - DNA, 15 bp, Homo sapiens
agctacttcccacca

SEQ ID NO: 32964 - DNA, 15 bp, Homo sapiens
gctacttcccaccac

SEQ ID NO: 32965 - DNA, 15 bp, Homo sapiens
ctacttcccaccacc

SEQ ID NO: 32966 - DNA, 15 bp, Homo sapiens
tacttcccaccacca

SEQ ID NO: 32967 - DNA, 15 bp, Homo sapiens
acttcccaccaccaa

SEQ ID NO: 32968 - DNA, 15 bp, Homo sapiens
cttcccaccaccaaa

SEQ ID NO: 32969 - DNA, 15 bp, Homo sapiens
ttcccaccaccaaat

SEQ ID NO: 32970 - DNA, 15 bp, Homo sapiens
tcccaccaccaaata

SEQ ID NO: 32971 - DNA, 15 bp, Homo sapiens
cccaccaccaaataa

SEQ ID NO: 32972 - DNA, 15 bp, Homo sapiens
ccaccaccaaataac

SEQ ID NO: 32973 - DNA, 15 bp, Homo sapiens
caccaccaaataact

SEQ ID NO: 32974 - DNA, 15 bp, Homo sapiens
accaccaaataactg

SEQ ID NO: 32975 - DNA, 15 bp, Homo sapiens
ccaccaaataactgg

SEQ ID NO: 32976 - DNA, 15 bp, Homo sapiens
caccaaataactggt

SEQ ID NO: 32977 - DNA, 15 bp, Homo sapiens
accaaataactggtt

SEQ ID NO: 32978 - DNA, 15 bp, Homo sapiens
ccaaataactggttt

SEQ ID NO: 32979 - DNA, 15 bp, Homo sapiens
caaataactggtttg

SEQ ID NO: 32980 - DNA, 15 bp, Homo sapiens
aaataactggtttgt

SEQ ID NO: 32981 - DNA, 15 bp, Homo sapiens
aataactggtttgtc

SEQ ID NO: 32982 - DNA, 15 bp, Homo sapiens
ataactggtttgtct

SEQ ID NO: 32983 - DNA, 15 bp, Homo sapiens
taactggtttgtctc

SEQ ID NO: 32984 - DNA, 15 bp, Homo sapiens
aactggtttgtctct

SEQ ID NO: 32985 - DNA, 15 bp, Homo sapiens
actggtttgtctcta

SEQ ID NO: 32986 - DNA, 15 bp, Homo sapiens
ctggtttgtctctag

SEQ ID NO: 32987 - DNA, 15 bp, Homo sapiens
tggtttgtctctagg

SEQ ID NO: 32988 - DNA, 15 bp, Homo sapiens
ggtttgtctctagga

SEQ ID NO: 32989 - DNA, 15 bp, Homo sapiens
gtttgtctctaggaa

SEQ ID NO: 32990 - DNA, 15 bp, Homo sapiens
tttgtctctaggaat

SEQ ID NO: 32991 - DNA, 15 bp, Homo sapiens
ttgtctctaggaatg

SEQ ID NO: 32992 - DNA, 15 bp, Homo sapiens
tgtctctaggaatgg

SEQ ID NO: 32993 - DNA, 15 bp, Homo sapiens
gtctctaggaatgga

SEQ ID NO: 32994 - DNA, 15 bp, Homo sapiens
tctctaggaatggaa

SEQ ID NO: 32995 - DNA, 15 bp, Homo sapiens
ctctaggaatggaag

SEQ ID NO: 32996 - DNA, 15 bp, Homo sapiens
tctaggaatggaagg

SEQ ID NO: 32997 - DNA, 15 bp, Homo sapiens
ctaggaatggaagga

SEQ ID NO: 32998 - DNA, 15 bp, Homo sapiens
taggaatggaaggac

SEQ ID NO: 32999 - DNA, 15 bp, Homo sapiens
aggaatggaaggact

SEQ ID NO: 33000 - DNA, 15 bp, Homo sapiens
ggaatggaaggacta

SEQ ID NO: 33001 - DNA, 15 bp, Homo sapiens
gaatggaaggactaa

SEQ ID NO: 33002 - DNA, 15 bp, Homo sapiens
aatggaaggactaaa

SEQ ID NO: 33003 - DNA, 15 bp, Homo sapiens
atggaaggactaaaa

SEQ ID NO: 33004 - DNA, 15 bp, Homo sapiens
tggaaggactaaaat

SEQ ID NO: 33005 - DNA, 15 bp, Homo sapiens
ggaaggactaaaata

SEQ ID NO: 33006 - DNA, 15 bp, Homo sapiens
gaaggactaaaatat

SEQ ID NO: 33007 - DNA, 15 bp, Homo sapiens
aaggactaaaatata

SEQ ID NO: 33008 - DNA, 15 bp, Homo sapiens
aggactaaaatatag

SEQ ID NO: 33009 - DNA, 15 bp, Homo sapiens
ggactaaaatatagg

SEQ ID NO: 33010 - DNA, 15 bp, Homo sapiens
gactaaaatataggg

SEQ ID NO: 33011 - DNA, 15 bp, Homo sapiens
actaaaatatagggg

SEQ ID NO: 33012 - DNA, 15 bp, Homo sapiens
ctaaaatatagggga

SEQ ID NO: 33013 - DNA, 15 bp, Homo sapiens
taaaatataggggaa

SEQ ID NO: 33014 - DNA, 15 bp, Homo sapiens
aaaatataggggaaa

SEQ ID NO: 33015 - DNA, 15 bp, Homo sapiens
aaatataggggaaat

SEQ ID NO: 33016 - DNA, 15 bp, Homo sapiens
aatataggggaaata

SEQ ID NO: 33017 - DNA, 15 bp, Homo sapiens
atataggggaaatac

SEQ ID NO: 33018 - DNA, 15 bp, Homo sapiens
tataggggaaatact

SEQ ID NO: 33019 - DNA, 15 bp, Homo sapiens
ataggggaaatactg

SEQ ID NO: 33020 - DNA, 15 bp, Homo sapiens
taggggaaatactgt

SEQ ID NO: 33021 - DNA, 15 bp, Homo sapiens
aggggaaatactgtg

SEQ ID NO: 33022 - DNA, 15 bp, Homo sapiens
ggggaaatactgtgc

SEQ ID NO: 33023 - DNA, 15 bp, Homo sapiens
gggaaatactgtgca

SEQ ID NO: 33024 - DNA, 15 bp, Homo sapiens
ggaaatactgtgcat

SEQ ID NO: 33025 - DNA, 15 bp, Homo sapiens
gaaatactgtgcatt

SEQ ID NO: 33026 - DNA, 15 bp, Homo sapiens
aaatactgtgcattt

SEQ ID NO: 33027 - DNA, 15 bp, Homo sapiens
aatactgtgcattta

SEQ ID NO: 33028 - DNA, 15 bp, Homo sapiens
atactgtgcatttaa

SEQ ID NO: 33029 - DNA, 15 bp, Homo sapiens
tactgtgcatttaaa

SEQ ID NO: 33030 - DNA, 15 bp, Homo sapiens
actgtgcatttaaat

SEQ ID NO: 33031 - DNA, 15 bp, Homo sapiens
ctgtgcatttaaata

SEQ ID NO: 33032 - DNA, 15 bp, Homo sapiens
tgtgcatttaaataa

SEQ ID NO: 33033 - DNA, 15 bp, Homo sapiens
gtgcatttaaataaa

SEQ ID NO: 33034 - DNA, 15 bp, Homo sapiens
tgcatttaaataaaa

SEQ ID NO: 33035 - DNA, 15 bp, Homo sapiens
gcatttaaataaaaa

SEQ ID NO: 33036 - DNA, 15 bp, Homo sapiens
catttaaataaaaat

SEQ ID NO: 33037 - DNA, 15 bp, Homo sapiens
atttaaataaaaatg

SEQ ID NO: 33038 - DNA, 15 bp, Homo sapiens
tttaaataaaaatga

SEQ ID NO: 33039 - DNA, 15 bp, Homo sapiens
ttaaataaaaatgaa

SEQ ID NO: 33040 - DNA, 15 bp, Homo sapiens
taaataaaaatgaat

SEQ ID NO: 33041 - DNA, 15 bp, Homo sapiens
aaataaaaatgaata

SEQ ID NO: 33042 - DNA, 15 bp, Homo sapiens
aataaaaatgaatag

SEQ ID NO: 33043 - DNA, 15 bp, Homo sapiens
ataaaaatgaatagt

SEQ ID NO: 33044 - DNA, 15 bp, Homo sapiens
taaaaatgaatagta

SEQ ID NO: 33045 - DNA, 15 bp, Homo sapiens
aaaaatgaatagtat

SEQ ID NO: 33046 - DNA, 15 bp, Homo sapiens
aaaatgaatagtatt

SEQ ID NO: 33047 - DNA, 15 bp, Homo sapiens
aaatgaatagtattt

SEQ ID NO: 33048 - DNA, 15 bp, Homo sapiens
aatgaatagtattta

SEQ ID NO: 33049 - DNA, 15 bp, Homo sapiens
atgaatagtatttaa

SEQ ID NO: 33050 - DNA, 15 bp, Homo sapiens
tgaatagtatttaaa

SEQ ID NO: 33051 - DNA, 15 bp, Homo sapiens
gaatagtatttaaaa

SEQ ID NO: 33052 - DNA, 15 bp, Homo sapiens
aatagtatttaaaag

SEQ ID NO: 33053 - DNA, 15 bp, Homo sapiens
atagtatttaaaaga

SEQ ID NO: 33054 - DNA, 15 bp, Homo sapiens
tagtatttaaaagaa

SEQ ID NO: 33055 - DNA, 15 bp, Homo sapiens
agtatttaaaagaaa

SEQ ID NO: 33056 - DNA, 15 bp, Homo sapiens
gtatttaaaagaaat

SEQ ID NO: 33057 - DNA, 15 bp, Homo sapiens
tatttaaaagaaatc

SEQ ID NO: 33058 - DNA, 15 bp, Homo sapiens
atttaaaagaaatca

SEQ ID NO: 33059 - DNA, 15 bp, Homo sapiens
tttaaaagaaatcac

SEQ ID NO: 33060 - DNA, 15 bp, Homo sapiens
ttaaaagaaatcaca

SEQ ID NO: 33061 - DNA, 15 bp, Homo sapiens
taaaagaaatcacaa

SEQ ID NO: 33062 - DNA, 15 bp, Homo sapiens
aaaagaaatcacaaa

SEQ ID NO: 33063 - DNA, 15 bp, Homo sapiens
aaagaaatcacaaaa

SEQ ID NO: 33064 - DNA, 15 bp, Homo sapiens
aagaaatcacaaaag

SEQ ID NO: 33065 - DNA, 15 bp, Homo sapiens
agaaatcacaaaaga

SEQ ID NO: 33066 - DNA, 15 bp, Homo sapiens
gaaatcacaaaagat

SEQ ID NO: 33067 - DNA, 15 bp, Homo sapiens
aaatcacaaaagatg

SEQ ID NO: 33068 - DNA, 15 bp, Homo sapiens
aatcacaaaagatga

SEQ ID NO: 33069 - DNA, 15 bp, Homo sapiens
atcacaaaagatgaa

SEQ ID NO: 33070 - DNA, 15 bp, Homo sapiens
tcacaaaagatgaaa

SEQ ID NO: 33071 - DNA, 15 bp, Homo sapiens
cacaaaagatgaaat

SEQ ID NO: 33072 - DNA, 15 bp, Homo sapiens
acaaaagatgaaatc

SEQ ID NO: 33073 - DNA, 15 bp, Homo sapiens
caaaagatgaaatct

SEQ ID NO: 33074 - DNA, 15 bp, Homo sapiens
aaaagatgaaatctg

SEQ ID NO: 33075 - DNA, 15 bp, Homo sapiens
aaagatgaaatctga

SEQ ID NO: 33076 - DNA, 15 bp, Homo sapiens
aagatgaaatctgaa

SEQ ID NO: 33077 - DNA, 15 bp, Homo sapiens
agatgaaatctgaac

SEQ ID NO: 33078 - DNA, 15 bp, Homo sapiens
gatgaaatctgaacc

SEQ ID NO: 33079 - DNA, 15 bp, Homo sapiens
atgaaatctgaacct

SEQ ID NO: 33080 - DNA, 15 bp, Homo sapiens
tgaaatctgaacctg

SEQ ID NO: 33081 - DNA, 15 bp, Homo sapiens
gaaatctgaacctgt

SEQ ID NO: 33082 - DNA, 15 bp, Homo sapiens
aaatctgaacctgtt

SEQ ID NO: 33083 - DNA, 15 bp, Homo sapiens
aatctgaacctgttt

SEQ ID NO: 33084 - DNA, 15 bp, Homo sapiens
atctgaacctgtttt

SEQ ID NO: 33085 - DNA, 15 bp, Homo sapiens
tctgaacctgttttg

SEQ ID NO: 33086 - DNA, 15 bp, Homo sapiens
ctgaacctgttttgc

SEQ ID NO: 33087 - DNA, 15 bp, Homo sapiens
tgaacctgttttgca

SEQ ID NO: 33088 - DNA, 15 bp, Homo sapiens
gaacctgttttgcat

SEQ ID NO: 33089 - DNA, 15 bp, Homo sapiens
aacctgttttgcatt

SEQ ID NO: 33090 - DNA, 15 bp, Homo sapiens
acctgttttgcattt

SEQ ID NO: 33091 - DNA, 15 bp, Homo sapiens
cctgttttgcattta

SEQ ID NO: 33092 - DNA, 15 bp, Homo sapiens
ctgttttgcatttat

SEQ ID NO: 33093 - DNA, 15 bp, Homo sapiens
tgttttgcatttata

SEQ ID NO: 33094 - DNA, 15 bp, Homo sapiens
gttttgcatttataa

SEQ ID NO: 33095 - DNA, 15 bp, Homo sapiens
ttttgcatttataat

SEQ ID NO: 33096 - DNA, 15 bp, Homo sapiens
tttgcatttataatt

SEQ ID NO: 33097 - DNA, 15 bp, Homo sapiens
ttgcatttataattt

SEQ ID NO: 33098 - DNA, 15 bp, Homo sapiens
tgcatttataatttg

SEQ ID NO: 33099 - DNA, 15 bp, Homo sapiens
gcatttataatttga

SEQ ID NO: 33100 - DNA, 15 bp, Homo sapiens
catttataatttgat

SEQ ID NO: 33101 - DNA, 15 bp, Homo sapiens
atttataatttgatg

SEQ ID NO: 33102 - DNA, 15 bp, Homo sapiens
tttataatttgatgt

SEQ ID NO: 33103 - DNA, 15 bp, Homo sapiens
ttataatttgatgta

SEQ ID NO: 33104 - DNA, 15 bp, Homo sapiens
tataatttgatgtac

SEQ ID NO: 33105 - DNA, 15 bp, Homo sapiens
ataatttgatgtacg

SEQ ID NO: 33106 - DNA, 15 bp, Homo sapiens
taatttgatgtacgg

SEQ ID NO: 33107 - DNA, 15 bp, Homo sapiens
aatttgatgtacggt

SEQ ID NO: 33108 - DNA, 15 bp, Homo sapiens
atttgatgtacggtt

SEQ ID NO: 33109 - DNA, 15 bp, Homo sapiens
tttgatgtacggttg

SEQ ID NO: 33110 - DNA, 15 bp, Homo sapiens
ttgatgtacggttga

SEQ ID NO: 33111 - DNA, 15 bp, Homo sapiens
tgatgtacggttgaa

SEQ ID NO: 33112 - DNA, 15 bp, Homo sapiens
gatgtacggttgaac

SEQ ID NO: 33113 - DNA, 15 bp, Homo sapiens
atgtacggttgaaca

SEQ ID NO: 33114 - DNA, 15 bp, Homo sapiens
tgtacggttgaacat

SEQ ID NO: 33115 - DNA, 15 bp, Homo sapiens
gtacggttgaacata

SEQ ID NO: 33116 - DNA, 15 bp, Homo sapiens
tacggttgaacataa

SEQ ID NO: 33117 - DNA, 15 bp, Homo sapiens
acggttgaacataaa

SEQ ID NO: 33118 - DNA, 15 bp, Homo sapiens
cggttgaacataaat

SEQ ID NO: 33119 - DNA, 15 bp, Homo sapiens
ggttgaacataaata

SEQ ID NO: 33120 - DNA, 15 bp, Homo sapiens
gttgaacataaatag

SEQ ID NO: 33121 - DNA, 15 bp, Homo sapiens
ttgaacataaatagg

SEQ ID NO: 33122 - DNA, 15 bp, Homo sapiens
tgaacataaataggg

SEQ ID NO: 33123 - DNA, 15 bp, Homo sapiens
gaacataaataggga

SEQ ID NO: 33124 - DNA, 15 bp, Homo sapiens
aacataaatagggat

SEQ ID NO: 33125 - DNA, 15 bp, Homo sapiens
acataaatagggatg

SEQ ID NO: 33126 - DNA, 15 bp, Homo sapiens
cataaatagggatgt

SEQ ID NO: 33127 - DNA, 15 bp, Homo sapiens
ataaatagggatgta

SEQ ID NO: 33128 - DNA, 15 bp, Homo sapiens
taaatagggatgtaa

SEQ ID NO: 33129 - DNA, 15 bp, Homo sapiens
aaatagggatgtaat

SEQ ID NO: 33130 - DNA, 15 bp, Homo sapiens
aatagggatgtaata

SEQ ID NO: 33131 - DNA, 15 bp, Homo sapiens
atagggatgtaataa

SEQ ID NO: 33132 - DNA, 15 bp, Homo sapiens
tagggatgtaataag

SEQ ID NO: 33133 - DNA, 15 bp, Homo sapiens
agggatgtaataagt

SEQ ID NO: 33134 - DNA, 15 bp, Homo sapiens
gggatgtaataagta

SEQ ID NO: 33135 - DNA, 15 bp, Homo sapiens
ggatgtaataagtaa

SEQ ID NO: 33136 - DNA, 15 bp, Homo sapiens
gatgtaataagtaat

SEQ ID NO: 33137 - DNA, 15 bp, Homo sapiens
atgtaataagtaatg

SEQ ID NO: 33138 - DNA, 15 bp, Homo sapiens
tgtaataagtaatgc

SEQ ID NO: 33139 - DNA, 15 bp, Homo sapiens
gtaataagtaatgct

SEQ ID NO: 33140 - DNA, 15 bp, Homo sapiens
taataagtaatgcta

SEQ ID NO: 33141 - DNA, 15 bp, Homo sapiens
aataagtaatgctat

SEQ ID NO: 33142 - DNA, 15 bp, Homo sapiens
ataagtaatgctatc

SEQ ID NO: 33143 - DNA, 15 bp, Homo sapiens
taagtaatgctatca

SEQ ID NO: 33144 - DNA, 15 bp, Homo sapiens
aagtaatgctatcaa

SEQ ID NO: 33145 - DNA, 15 bp, Homo sapiens
agtaatgctatcaat

SEQ ID NO: 33146 - DNA, 15 bp, Homo sapiens
gtaatgctatcaatt

SEQ ID NO: 33147 - DNA, 15 bp, Homo sapiens
taatgctatcaatta

SEQ ID NO: 33148 - DNA, 15 bp, Homo sapiens
aatgctatcaattac

SEQ ID NO: 33149 - DNA, 15 bp, Homo sapiens
atgctatcaattaca

SEQ ID NO: 33150 - DNA, 15 bp, Homo sapiens
tgctatcaattacat

SEQ ID NO: 33151 - DNA, 15 bp, Homo sapiens
gctatcaattacatc

SEQ ID NO: 33152 - DNA, 15 bp, Homo sapiens
ctatcaattacatcc

SEQ ID NO: 33153 - DNA, 15 bp, Homo sapiens
tatcaattacatcct

SEQ ID NO: 33154 - DNA, 15 bp, Homo sapiens
atcaattacatcctc

SEQ ID NO: 33155 - DNA, 15 bp, Homo sapiens
tcaattacatcctct

SEQ ID NO: 33156 - DNA, 15 bp, Homo sapiens
caattacatcctctt

SEQ ID NO: 33157 - DNA, 15 bp, Homo sapiens
aattacatcctcttg

SEQ ID NO: 33158 - DNA, 15 bp, Homo sapiens
attacatcctcttgc

SEQ ID NO: 33159 - DNA, 15 bp, Homo sapiens
ttacatcctcttgcc

SEQ ID NO: 33160 - DNA, 15 bp, Homo sapiens
tacatcctcttgcct

SEQ ID NO: 33161 - DNA, 15 bp, Homo sapiens
acatcctcttgcctc

SEQ ID NO: 33162 - DNA, 15 bp, Homo sapiens
catcctcttgcctca

SEQ ID NO: 33163 - DNA, 15 bp, Homo sapiens
atcctcttgcctcaa

SEQ ID NO: 33164 - DNA, 15 bp, Homo sapiens
tcctcttgcctcaat

SEQ ID NO: 33165 - DNA, 15 bp, Homo sapiens
cctcttgcctcaatg

SEQ ID NO: 33166 - DNA, 15 bp, Homo sapiens
ctcttgcctcaatgc

SEQ ID NO: 33167 - DNA, 15 bp, Homo sapiens
tcttgcctcaatgct

SEQ ID NO: 33168 - DNA, 15 bp, Homo sapiens
cttgcctcaatgctc

SEQ ID NO: 33169 - DNA, 15 bp, Homo sapiens
ttgcctcaatgctca

SEQ ID NO: 33170 - DNA, 15 bp, Homo sapiens
tgcctcaatgctcaa

SEQ ID NO: 33171 - DNA, 15 bp, Homo sapiens
gcctcaatgctcaaa

SEQ ID NO: 33172 - DNA, 15 bp, Homo sapiens
cctcaatgctcaaat

SEQ ID NO: 33173 - DNA, 15 bp, Homo sapiens
ctcaatgctcaaata

SEQ ID NO: 33174 - DNA, 15 bp, Homo sapiens
tcaatgctcaaatat

SEQ ID NO: 33175 - DNA, 15 bp, Homo sapiens
caatgctcaaatatt

SEQ ID NO: 33176 - DNA, 15 bp, Homo sapiens
aatgctcaaatatta

SEQ ID NO: 33177 - DNA, 15 bp, Homo sapiens
atgctcaaatattaa

SEQ ID NO: 33178 - DNA, 15 bp, Homo sapiens
tgctcaaatattaag

SEQ ID NO: 33179 - DNA, 15 bp, Homo sapiens
gctcaaatattaaga

SEQ ID NO: 33180 - DNA, 15 bp, Homo sapiens
ctcaaatattaagaa

SEQ ID NO: 33181 - DNA, 15 bp, Homo sapiens
tcaaatattaagaat

SEQ ID NO: 33182 - DNA, 15 bp, Homo sapiens
caaatattaagaata

SEQ ID NO: 33183 - DNA, 15 bp, Homo sapiens
aaatattaagaatat

SEQ ID NO: 33184 - DNA, 15 bp, Homo sapiens
aatattaagaatatg

SEQ ID NO: 33185 - DNA, 15 bp, Homo sapiens
atattaagaatatgt

SEQ ID NO: 33186 - DNA, 15 bp, Homo sapiens
tattaagaatatgta

SEQ ID NO: 33187 - DNA, 15 bp, Homo sapiens
attaagaatatgtat

SEQ ID NO: 33188 - DNA, 15 bp, Homo sapiens
ttaagaatatgtatt

SEQ ID NO: 33189 - DNA, 15 bp, Homo sapiens
taagaatatgtattt

SEQ ID NO: 33190 - DNA, 15 bp, Homo sapiens
aagaatatgtatttt

SEQ ID NO: 33191 - DNA, 15 bp, Homo sapiens
agaatatgtatttta

SEQ ID NO: 33192 - DNA, 15 bp, Homo sapiens
gaatatgtattttag

SEQ ID NO: 33193 - DNA, 15 bp, Homo sapiens
aatatgtattttagc

SEQ ID NO: 33194 - DNA, 15 bp, Homo sapiens
atatgtattttagca

SEQ ID NO: 33195 - DNA, 15 bp, Homo sapiens
tatgtattttagcaa

SEQ ID NO: 33196 - DNA, 15 bp, Homo sapiens
atgtattttagcaat

SEQ ID NO: 33197 - DNA, 15 bp, Homo sapiens
tgtattttagcaatg

SEQ ID NO: 33198 - DNA, 15 bp, Homo sapiens
gtattttagcaatga

SEQ ID NO: 33199 - DNA, 15 bp, Homo sapiens
tattttagcaatgat

SEQ ID NO: 33200 - DNA, 15 bp, Homo sapiens
attttagcaatgatt

SEQ ID NO: 33201 - DNA, 15 bp, Homo sapiens
ttttagcaatgattg

SEQ ID NO: 33202 - DNA, 15 bp, Homo sapiens
tttagcaatgattgt

SEQ ID NO: 33203 - DNA, 15 bp, Homo sapiens
ttagcaatgattgtt

SEQ ID NO: 33204 - DNA, 15 bp, Homo sapiens
tagcaatgattgttt

SEQ ID NO: 33205 - DNA, 15 bp, Homo sapiens
agcaatgattgtttc

SEQ ID NO: 33206 - DNA, 15 bp, Homo sapiens
gcaatgattgtttca

SEQ ID NO: 33207 - DNA, 15 bp, Homo sapiens
caatgattgtttcag

SEQ ID NO: 33208 - DNA, 15 bp, Homo sapiens
aatgattgtttcagt

SEQ ID NO: 33209 - DNA, 15 bp, Homo sapiens
atgattgtttcagtg

SEQ ID NO: 33210 - DNA, 15 bp, Homo sapiens
tgattgtttcagtgt

SEQ ID NO: 33211 - DNA, 15 bp, Homo sapiens
gattgtttcagtgtt

SEQ ID NO: 33212 - DNA, 15 bp, Homo sapiens
attgtttcagtgttt

SEQ ID NO: 33213 - DNA, 15 bp, Homo sapiens
ttgtttcagtgttta

SEQ ID NO: 33214 - DNA, 15 bp, Homo sapiens
tgtttcagtgtttaa

SEQ ID NO: 33215 - DNA, 15 bp, Homo sapiens
gtttcagtgtttaaa

SEQ ID NO: 33216 - DNA, 15 bp, Homo sapiens
tttcagtgtttaaaa

SEQ ID NO: 33217 - DNA, 15 bp, Homo sapiens
ttcagtgtttaaaaa

SEQ ID NO: 33218 - DNA, 15 bp, Homo sapiens
tcagtgtttaaaaac

SEQ ID NO: 33219 - DNA, 15 bp, Homo sapiens
cagtgtttaaaaact

SEQ ID NO: 33220 - DNA, 15 bp, Homo sapiens
agtgtttaaaaactt

SEQ ID NO: 33221 - DNA, 15 bp, Homo sapiens
gtgtttaaaaactta

SEQ ID NO: 33222 - DNA, 15 bp, Homo sapiens
tgtttaaaaacttac

SEQ ID NO: 33223 - DNA, 15 bp, Homo sapiens
gtttaaaaacttact

SEQ ID NO: 33224 - DNA, 15 bp, Homo sapiens
tttaaaaacttactt

SEQ ID NO: 33225 - DNA, 15 bp, Homo sapiens
ttaaaaacttacttt

SEQ ID NO: 33226 - DNA, 15 bp, Homo sapiens
taaaaacttactttc

SEQ ID NO: 33227 - DNA, 15 bp, Homo sapiens
aaaaacttactttca

SEQ ID NO: 33228 - DNA, 15 bp, Homo sapiens
aaaacttactttcat

SEQ ID NO: 33229 - DNA, 15 bp, Homo sapiens
aaacttactttcata

SEQ ID NO: 33230 - DNA, 15 bp, Homo sapiens
aacttactttcataa

SEQ ID NO: 33231 - DNA, 15 bp, Homo sapiens
acttactttcataaa

SEQ ID NO: 33232 - DNA, 15 bp, Homo sapiens
cttactttcataaat

SEQ ID NO: 33233 - DNA, 15 bp, Homo sapiens
ttactttcataaatc

SEQ ID NO: 33234 - DNA, 15 bp, Homo sapiens
tactttcataaatca

SEQ ID NO: 33235 - DNA, 15 bp, Homo sapiens
actttcataaatcag

SEQ ID NO: 33236 - DNA, 15 bp, Homo sapiens
ctttcataaatcagt

SEQ ID NO: 33237 - DNA, 15 bp, Homo sapiens
tttcataaatcagta

SEQ ID NO: 33238 - DNA, 15 bp, Homo sapiens
ttcataaatcagtat

SEQ ID NO: 33239 - DNA, 15 bp, Homo sapiens
tcataaatcagtata

SEQ ID NO: 33240 - DNA, 15 bp, Homo sapiens
cataaatcagtataa

SEQ ID NO: 33241 - DNA, 15 bp, Homo sapiens
ataaatcagtataaa

SEQ ID NO: 33242 - DNA, 15 bp, Homo sapiens
taaatcagtataaat

SEQ ID NO: 33243 - DNA, 15 bp, Homo sapiens
aaatcagtataaatg

SEQ ID NO: 33244 - DNA, 15 bp, Homo sapiens
aatcagtataaatga

SEQ ID NO: 33245 - DNA, 15 bp, Homo sapiens
atcagtataaatgaa

SEQ ID NO: 33246 - DNA, 15 bp, Homo sapiens
tcagtataaatgaat

SEQ ID NO: 33247 - DNA, 15 bp, Homo sapiens
cagtataaatgaata

SEQ ID NO: 33248 - DNA, 15 bp, Homo sapiens
agtataaatgaatat

SEQ ID NO: 33249 - DNA, 15 bp, Homo sapiens
gtataaatgaatatc

SEQ ID NO: 33250 - DNA, 15 bp, Homo sapiens
tataaatgaatatcc

SEQ ID NO: 33251 - DNA, 15 bp, Homo sapiens
ataaatgaatatcca

SEQ ID NO: 33252 - DNA, 15 bp, Homo sapiens
taaatgaatatccat

SEQ ID NO: 33253 - DNA, 15 bp, Homo sapiens
aaatgaatatccatt

SEQ ID NO: 33254 - DNA, 15 bp, Homo sapiens
aatgaatatccatta

SEQ ID NO: 33255 - DNA, 15 bp, Homo sapiens
atgaatatccattat

SEQ ID NO: 33256 - DNA, 15 bp, Homo sapiens
tgaatatccattata

SEQ ID NO: 33257 - DNA, 15 bp, Homo sapiens
gaatatccattatat

SEQ ID NO: 33258 - DNA, 15 bp, Homo sapiens
aatatccattatata

SEQ ID NO: 33259 - DNA, 15 bp, Homo sapiens
atatccattatatat

SEQ ID NO: 33260 - DNA, 15 bp, Homo sapiens
tatccattatatatt

SEQ ID NO: 33261 - DNA, 15 bp, Homo sapiens
atccattatatatta

SEQ ID NO: 33262 - DNA, 15 bp, Homo sapiens
tccattatatattat

SEQ ID NO: 33263 - DNA, 15 bp, Homo sapiens
ccattatatattatg

SEQ ID NO: 33264 - DNA, 15 bp, Homo sapiens
cattatatattatgt

SEQ ID NO: 33265 - DNA, 15 bp, Homo sapiens
attatatattatgtt

SEQ ID NO: 33266 - DNA, 15 bp, Homo sapiens
ttatatattatgttt

SEQ ID NO: 33267 - DNA, 15 bp, Homo sapiens
tatatattatgttta

SEQ ID NO: 33268 - DNA, 15 bp, Homo sapiens
atatattatgtttaa

SEQ ID NO: 33269 - DNA, 15 bp, Homo sapiens
tatattatgtttaag

SEQ ID NO: 33270 - DNA, 15 bp, Homo sapiens
atattatgtttaagt

SEQ ID NO: 33271 - DNA, 15 bp, Homo sapiens
tattatgtttaagta

SEQ ID NO: 33272 - DNA, 15 bp, Homo sapiens
attatgtttaagtaa

SEQ ID NO: 33273 - DNA, 15 bp, Homo sapiens
ttatgtttaagtaaa

SEQ ID NO: 33274 - DNA, 15 bp, Homo sapiens
tatgtttaagtaaaa

SEQ ID NO: 33275 - DNA, 15 bp, Homo sapiens
atgtttaagtaaaag

SEQ ID NO: 33276 - DNA, 15 bp, Homo sapiens
tgtttaagtaaaagt

SEQ ID NO: 33277 - DNA, 15 bp, Homo sapiens
gtttaagtaaaagtg

SEQ ID NO: 33278 - DNA, 15 bp, Homo sapiens
tttaagtaaaagtga

SEQ ID NO: 33279 - DNA, 15 bp, Homo sapiens
ttaagtaaaagtgaa

SEQ ID NO: 33280 - DNA, 15 bp, Homo sapiens
taagtaaaagtgaaa

SEQ ID NO: 33281 - DNA, 15 bp, Homo sapiens
aagtaaaagtgaaaa

SEQ ID NO: 33282 - DNA, 15 bp, Homo sapiens
agtaaaagtgaaaaa

SEQ ID NO: 33283 - DNA, 15 bp, Homo sapiens
gtaaaagtgaaaaaa

SEQ ID NO: 33284 - DNA, 15 bp, Homo sapiens
taaaagtgaaaaaac

SEQ ID NO: 33285 - DNA, 15 bp, Homo sapiens
aaaagtgaaaaaact

SEQ ID NO: 33286 - DNA, 15 bp, Homo sapiens
aaagtgaaaaaactt

SEQ ID NO: 33287 - DNA, 15 bp, Homo sapiens
aagtgaaaaaacttg

SEQ ID NO: 33288 - DNA, 15 bp, Homo sapiens
agtgaaaaaacttgc

SEQ ID NO: 33289 - DNA, 15 bp, Homo sapiens
gtgaaaaaacttgca

SEQ ID NO: 33290 - DNA, 15 bp, Homo sapiens
tgaaaaaacttgcac

SEQ ID NO: 33291 - DNA, 15 bp, Homo sapiens
gaaaaaacttgcact

SEQ ID NO: 33292 - DNA, 15 bp, Homo sapiens
aaaaaacttgcactg

SEQ ID NO: 33293 - DNA, 15 bp, Homo sapiens
aaaaacttgcactgt

SEQ ID NO: 33294 - DNA, 15 bp, Homo sapiens
aaaacttgcactgta

SEQ ID NO: 33295 - DNA, 15 bp, Homo sapiens
aaacttgcactgtac

SEQ ID NO: 33296 - DNA, 15 bp, Homo sapiens
aacttgcactgtact

SEQ ID NO: 33297 - DNA, 15 bp, Homo sapiens
acttgcactgtactg

SEQ ID NO: 33298 - DNA, 15 bp, Homo sapiens
cttgcactgtactga

SEQ ID NO: 33299 - DNA, 15 bp, Homo sapiens
ttgcactgtactgag

SEQ ID NO: 33300 - DNA, 15 bp, Homo sapiens
tgcactgtactgagt

SEQ ID NO: 33301 - DNA, 15 bp, Homo sapiens
gcactgtactgagtc

SEQ ID NO: 33302 - DNA, 15 bp, Homo sapiens
cactgtactgagtca

SEQ ID NO: 33303 - DNA, 15 bp, Homo sapiens
actgtactgagtcat

SEQ ID NO: 33304 - DNA, 15 bp, Homo sapiens
ctgtactgagtcatg

SEQ ID NO: 33305 - DNA, 15 bp, Homo sapiens
tgtactgagtcatga

SEQ ID NO: 33306 - DNA, 15 bp, Homo sapiens
gtactgagtcatgat

SEQ ID NO: 33307 - DNA, 15 bp, Homo sapiens
tactgagtcatgatt

SEQ ID NO: 33308 - DNA, 15 bp, Homo sapiens
actgagtcatgattt

SEQ ID NO: 33309 - DNA, 15 bp, Homo sapiens
ctgagtcatgattta

SEQ ID NO: 33310 - DNA, 15 bp, Homo sapiens
tgagtcatgatttac

SEQ ID NO: 33311 - DNA, 15 bp, Homo sapiens
gagtcatgatttacc

SEQ ID NO: 33312 - DNA, 15 bp, Homo sapiens
agtcatgatttacca

SEQ ID NO: 33313 - DNA, 15 bp, Homo sapiens
gtcatgatttaccac

SEQ ID NO: 33314 - DNA, 15 bp, Homo sapiens
tcatgatttaccact

SEQ ID NO: 33315 - DNA, 15 bp, Homo sapiens
catgatttaccactg

SEQ ID NO: 33316 - DNA, 15 bp, Homo sapiens
atgatttaccactgg

SEQ ID NO: 33317 - DNA, 15 bp, Homo sapiens
tgatttaccactggt

SEQ ID NO: 33318 - DNA, 15 bp, Homo sapiens
gatttaccactggtt

SEQ ID NO: 33319 - DNA, 15 bp, Homo sapiens
atttaccactggtta

SEQ ID NO: 33320 - DNA, 15 bp, Homo sapiens
tttaccactggttat

SEQ ID NO: 33321 - DNA, 15 bp, Homo sapiens
ttaccactggttata

SEQ ID NO: 33322 - DNA, 15 bp, Homo sapiens
taccactggttatat

SEQ ID NO: 33323 - DNA, 15 bp, Homo sapiens
accactggttatata

SEQ ID NO: 33324 - DNA, 15 bp, Homo sapiens
ccactggttatatat

SEQ ID NO: 33325 - DNA, 15 bp, Homo sapiens
cactggttatatata

SEQ ID NO: 33326 - DNA, 15 bp, Homo sapiens
actggttatatatat

SEQ ID NO: 33327 - DNA, 15 bp, Homo sapiens
ctggttatatatatt

SEQ ID NO: 33328 - DNA, 15 bp, Homo sapiens
tggttatatatatta

SEQ ID NO: 33329 - DNA, 15 bp, Homo sapiens
ggttatatatattat

SEQ ID NO: 33330 - DNA, 15 bp, Homo sapiens
gttatatatattatg

SEQ ID NO: 33331 - DNA, 15 bp, Homo sapiens
ttatatatattatgt

SEQ ID NO: 33332 - DNA, 15 bp, Homo sapiens
tatatatattatgtg

SEQ ID NO: 33333 - DNA, 15 bp, Homo sapiens
atatatattatgtgt

SEQ ID NO: 33334 - DNA, 15 bp, Homo sapiens
tatatattatgtgtg

SEQ ID NO: 33335 - DNA, 15 bp, Homo sapiens
atatattatgtgtgt

SEQ ID NO: 33336 - DNA, 15 bp, Homo sapiens
tatattatgtgtgtg

SEQ ID NO: 33337 - DNA, 15 bp, Homo sapiens
atattatgtgtgtgt

SEQ ID NO: 33338 - DNA, 15 bp, Homo sapiens
tattatgtgtgtgtt

SEQ ID NO: 33339 - DNA, 15 bp, Homo sapiens
attatgtgtgtgttc

SEQ ID NO: 33340 - DNA, 15 bp, Homo sapiens
ttatgtgtgtgttca

SEQ ID NO: 33341 - DNA, 15 bp, Homo sapiens
tatgtgtgtgttcaa

SEQ ID NO: 33342 - DNA, 15 bp, Homo sapiens
atgtgtgtgttcaaa

SEQ ID NO: 33343 - DNA, 15 bp, Homo sapiens
tgtgtgtgttcaaag

SEQ ID NO: 33344 - DNA, 15 bp, Homo sapiens
gtgtgtgttcaaagt

SEQ ID NO: 33345 - DNA, 15 bp, Homo sapiens
tgtgtgttcaaagta

SEQ ID NO: 33346 - DNA, 15 bp, Homo sapiens
gtgtgttcaaagtac

SEQ ID NO: 33347 - DNA, 15 bp, Homo sapiens
tgtgttcaaagtaca

SEQ ID NO: 33348 - DNA, 15 bp, Homo sapiens
gtgttcaaagtacaa

SEQ ID NO: 33349 - DNA, 15 bp, Homo sapiens
tgttcaaagtacaaa

SEQ ID NO: 33350 - DNA, 15 bp, Homo sapiens
gttcaaagtacaaaa

SEQ ID NO: 33351 - DNA, 15 bp, Homo sapiens
ttcaaagtacaaaat

SEQ ID NO: 33352 - DNA, 15 bp, Homo sapiens
tcaaagtacaaaatg

SEQ ID NO: 33353 - DNA, 15 bp, Homo sapiens
caaagtacaaaatgc

SEQ ID NO: 33354 - DNA, 15 bp, Homo sapiens
aaagtacaaaatgca

SEQ ID NO: 33355 - DNA, 15 bp, Homo sapiens
aagtacaaaatgcag

SEQ ID NO: 33356 - DNA, 15 bp, Homo sapiens
agtacaaaatgcagc

SEQ ID NO: 33357 - DNA, 15 bp, Homo sapiens
gtacaaaatgcagca

SEQ ID NO: 33358 - DNA, 15 bp, Homo sapiens
tacaaaatgcagcaa

SEQ ID NO: 33359 - DNA, 15 bp, Homo sapiens
acaaaatgcagcaat

SEQ ID NO: 33360 - DNA, 15 bp, Homo sapiens
caaaatgcagcaatg

SEQ ID NO: 33361 - DNA, 15 bp, Homo sapiens
aaaatgcagcaatga

SEQ ID NO: 33362 - DNA, 15 bp, Homo sapiens
aaatgcagcaatgat

SEQ ID NO: 33363 - DNA, 15 bp, Homo sapiens
aatgcagcaatgatg

SEQ ID NO: 33364 - DNA, 15 bp, Homo sapiens
atgcagcaatgatgt

SEQ ID NO: 33365 - DNA, 15 bp, Homo sapiens
tgcagcaatgatgtt

SEQ ID NO: 33366 - DNA, 15 bp, Homo sapiens
gcagcaatgatgtta

SEQ ID NO: 33367 - DNA, 15 bp, Homo sapiens
cagcaatgatgttaa

SEQ ID NO: 33368 - DNA, 15 bp, Homo sapiens
agcaatgatgttaac

SEQ ID NO: 33369 - DNA, 15 bp, Homo sapiens
gcaatgatgttaaca

SEQ ID NO: 33370 - DNA, 15 bp, Homo sapiens
caatgatgttaacat

SEQ ID NO: 33371 - DNA, 15 bp, Homo sapiens
aatgatgttaacatt

SEQ ID NO: 33372 - DNA, 15 bp, Homo sapiens
atgatgttaacattg

SEQ ID NO: 33373 - DNA, 15 bp, Homo sapiens
tgatgttaacattga

SEQ ID NO: 33374 - DNA, 15 bp, Homo sapiens
gatgttaacattgac

SEQ ID NO: 33375 - DNA, 15 bp, Homo sapiens
atgttaacattgaca

SEQ ID NO: 33376 - DNA, 15 bp, Homo sapiens
tgttaacattgacag

SEQ ID NO: 33377 - DNA, 15 bp, Homo sapiens
gttaacattgacagt

SEQ ID NO: 33378 - DNA, 15 bp, Homo sapiens
ttaacattgacagtg

SEQ ID NO: 33379 - DNA, 15 bp, Homo sapiens
taacattgacagtgt

SEQ ID NO: 33380 - DNA, 15 bp, Homo sapiens
aacattgacagtgta

SEQ ID NO: 33381 - DNA, 15 bp, Homo sapiens
acattgacagtgtaa

SEQ ID NO: 33382 - DNA, 15 bp, Homo sapiens
cattgacagtgtaat

SEQ ID NO: 33383 - DNA, 15 bp, Homo sapiens
attgacagtgtaatg

SEQ ID NO: 33384 - DNA, 15 bp, Homo sapiens
ttgacagtgtaatga

SEQ ID NO: 33385 - DNA, 15 bp, Homo sapiens
tgacagtgtaatgaa

SEQ ID NO: 33386 - DNA, 15 bp, Homo sapiens
gacagtgtaatgaac

SEQ ID NO: 33387 - DNA, 15 bp, Homo sapiens
acagtgtaatgaact

SEQ ID NO: 33388 - DNA, 15 bp, Homo sapiens
cagtgtaatgaactg

SEQ ID NO: 33389 - DNA, 15 bp, Homo sapiens
agtgtaatgaactgc

SEQ ID NO: 33390 - DNA, 15 bp, Homo sapiens
gtgtaatgaactgcc

SEQ ID NO: 33391 - DNA, 15 bp, Homo sapiens
tgtaatgaactgccg

SEQ ID NO: 33392 - DNA, 15 bp, Homo sapiens
gtaatgaactgccgt

SEQ ID NO: 33393 - DNA, 15 bp, Homo sapiens
taatgaactgccgta

SEQ ID NO: 33394 - DNA, 15 bp, Homo sapiens
aatgaactgccgtag

SEQ ID NO: 33395 - DNA, 15 bp, Homo sapiens
atgaactgccgtaga

SEQ ID NO: 33396 - DNA, 15 bp, Homo sapiens
tgaactgccgtagat

SEQ ID NO: 33397 - DNA, 15 bp, Homo sapiens
gaactgccgtagatg

SEQ ID NO: 33398 - DNA, 15 bp, Homo sapiens
aactgccgtagatga

SEQ ID NO: 33399 - DNA, 15 bp, Homo sapiens
actgccgtagatgag

SEQ ID NO: 33400 - DNA, 15 bp, Homo sapiens
ctgccgtagatgaga

SEQ ID NO: 33401 - DNA, 15 bp, Homo sapiens
tgccgtagatgagac

SEQ ID NO: 33402 - DNA, 15 bp, Homo sapiens
gccgtagatgagact

SEQ ID NO: 33403 - DNA, 15 bp, Homo sapiens
ccgtagatgagactg

SEQ ID NO: 33404 - DNA, 15 bp, Homo sapiens
cgtagatgagactgt

SEQ ID NO: 33405 - DNA, 15 bp, Homo sapiens
gtagatgagactgtt

SEQ ID NO: 33406 - DNA, 15 bp, Homo sapiens
tagatgagactgtta

SEQ ID NO: 33407 - DNA, 15 bp, Homo sapiens
agatgagactgttat

SEQ ID NO: 33408 - DNA, 15 bp, Homo sapiens
gatgagactgttatg

SEQ ID NO: 33409 - DNA, 15 bp, Homo sapiens
atgagactgttatgc

SEQ ID NO: 33410 - DNA, 15 bp, Homo sapiens
tgagactgttatgct

SEQ ID NO: 33411 - DNA, 15 bp, Homo sapiens
gagactgttatgctt

SEQ ID NO: 33412 - DNA, 15 bp, Homo sapiens
agactgttatgctta

SEQ ID NO: 33413 - DNA, 15 bp, Homo sapiens
gactgttatgcttaa

SEQ ID NO: 33414 - DNA, 15 bp, Homo sapiens
actgttatgcttaat

SEQ ID NO: 33415 - DNA, 15 bp, Homo sapiens
ctgttatgcttaatt

SEQ ID NO: 33416 - DNA, 15 bp, Homo sapiens
tgttatgcttaattt

SEQ ID NO: 33417 - DNA, 15 bp, Homo sapiens
gttatgcttaatttc

SEQ ID NO: 33418 - DNA, 15 bp, Homo sapiens
ttatgcttaatttct

SEQ ID NO: 33419 - DNA, 15 bp, Homo sapiens
tatgcttaatttctt

SEQ ID NO: 33420 - DNA, 15 bp, Homo sapiens
atgcttaatttcttg

SEQ ID NO: 33421 - DNA, 15 bp, Homo sapiens
tgcttaatttcttgg

SEQ ID NO: 33422 - DNA, 15 bp, Homo sapiens
gcttaatttcttgga

SEQ ID NO: 33423 - DNA, 15 bp, Homo sapiens
cttaatttcttggaa

SEQ ID NO: 33424 - DNA, 15 bp, Homo sapiens
ttaatttcttggaaa

SEQ ID NO: 33425 - DNA, 15 bp, Homo sapiens
taatttcttggaaaa

SEQ ID NO: 33426 - DNA, 15 bp, Homo sapiens
aatttcttggaaaac

SEQ ID NO: 33427 - DNA, 15 bp, Homo sapiens
atttcttggaaaact

SEQ ID NO: 33428 - DNA, 15 bp, Homo sapiens
tttcttggaaaactg

SEQ ID NO: 33429 - DNA, 15 bp, Homo sapiens
ttcttggaaaactgt

SEQ ID NO: 33430 - DNA, 15 bp, Homo sapiens
tcttggaaaactgta

SEQ ID NO: 33431 - DNA, 15 bp, Homo sapiens
cttggaaaactgtaa

SEQ ID NO: 33432 - DNA, 15 bp, Homo sapiens
ttggaaaactgtaaa

SEQ ID NO: 33433 - DNA, 15 bp, Homo sapiens
tggaaaactgtaaag

SEQ ID NO: 33434 - DNA, 15 bp, Homo sapiens
ggaaaactgtaaaga

SEQ ID NO: 33435 - DNA, 15 bp, Homo sapiens
gaaaactgtaaagaa

SEQ ID NO: 33436 - DNA, 15 bp, Homo sapiens
aaaactgtaaagaaa

SEQ ID NO: 33437 - DNA, 15 bp, Homo sapiens
aaactgtaaagaaat

SEQ ID NO: 33438 - DNA, 15 bp, Homo sapiens
aactgtaaagaaatt

SEQ ID NO: 33439 - DNA, 15 bp, Homo sapiens
actgtaaagaaattt

SEQ ID NO: 33440 - DNA, 15 bp, Homo sapiens
ctgtaaagaaatttc

SEQ ID NO: 33441 - DNA, 15 bp, Homo sapiens
tgtaaagaaatttca

SEQ ID NO: 33442 - DNA, 15 bp, Homo sapiens
gtaaagaaatttcac

SEQ ID NO: 33443 - DNA, 15 bp, Homo sapiens
taaagaaatttcaca

SEQ ID NO: 33444 - DNA, 15 bp, Homo sapiens
aaagaaatttcacag

SEQ ID NO: 33445 - DNA, 15 bp, Homo sapiens
aagaaatttcacagg

SEQ ID NO: 33446 - DNA, 15 bp, Homo sapiens
agaaatttcacaggt

SEQ ID NO: 33447 - DNA, 15 bp, Homo sapiens
gaaatttcacaggtt

SEQ ID NO: 33448 - DNA, 15 bp, Homo sapiens
aaatttcacaggtta

SEQ ID NO: 33449 - DNA, 15 bp, Homo sapiens
aatttcacaggttaa

SEQ ID NO: 33450 - DNA, 15 bp, Homo sapiens
atttcacaggttaaa

SEQ ID NO: 33451 - DNA, 15 bp, Homo sapiens
tttcacaggttaaaa

SEQ ID NO: 33452 - DNA, 15 bp, Homo sapiens
ttcacaggttaaaaa

SEQ ID NO: 33453 - DNA, 15 bp, Homo sapiens
tcacaggttaaaaaa

SEQ ID NO: 33454 - DNA, 15 bp, Homo sapiens
cacaggttaaaaaaa

SEQ ID NO: 33455 - DNA, 15 bp, Homo sapiens
acaggttaaaaaaaa

SEQ ID NO: 33456 - DNA, 15 bp, Homo sapiens
caggttaaaaaaaat

SEQ ID NO: 33457 - DNA, 15 bp, Homo sapiens
aggttaaaaaaaata

SEQ ID NO: 33458 - DNA, 15 bp, Homo sapiens
ggttaaaaaaaatag

SEQ ID NO: 33459 - DNA, 15 bp, Homo sapiens
gttaaaaaaaataga

SEQ ID NO: 33460 - DNA, 15 bp, Homo sapiens
ttaaaaaaaatagag

SEQ ID NO: 33461 - DNA, 15 bp, Homo sapiens
taaaaaaaatagagt

SEQ ID NO: 33462 - DNA, 15 bp, Homo sapiens
aaaaaaaatagagta

SEQ ID NO: 33463 - DNA, 15 bp, Homo sapiens
aaaaaaatagagtaa

SEQ ID NO: 33464 - DNA, 15 bp, Homo sapiens
aaaaaatagagtaag

SEQ ID NO: 33465 - DNA, 15 bp, Homo sapiens
aaaaatagagtaagc

SEQ ID NO: 33466 - DNA, 15 bp, Homo sapiens
aaaatagagtaagca

SEQ ID NO: 33467 - DNA, 15 bp, Homo sapiens
aaatagagtaagcaa

SEQ ID NO: 33468 - DNA, 15 bp, Homo sapiens
aatagagtaagcaaa

SEQ ID NO: 33469 - DNA, 15 bp, Homo sapiens
atagagtaagcaaaa

SEQ ID NO: 33470 - DNA, 15 bp, Homo sapiens
tagagtaagcaaaaa

SEQ ID NO: 33471 - DNA, 15 bp, Homo sapiens
agagtaagcaaaaaa

SEQ ID NO: 33472 - DNA, 15 bp, Homo sapiens
gagtaagcaaaaaaa

SEQ ID NO: 33473 - DNA, 15 bp, Homo sapiens
agtaagcaaaaaaaa

SEQ ID NO: 33474 - DNA, 15 bp, Homo sapiens
gtaagcaaaaaaaaa

SEQ ID NO: 33475 - DNA, 15 bp, Homo sapiens
taagcaaaaaaaaag

SEQ ID NO: 33476 - DNA, 15 bp, Homo sapiens
aagcaaaaaaaaaga

SEQ ID NO: 33477 - DNA, 15 bp, Homo sapiens
agcaaaaaaaaagaa

SEQ ID NO: 33478 - DNA, 15 bp, Homo sapiens
gcaaaaaaaaagaat

SEQ ID NO: 33479 - DNA, 15 bp, Homo sapiens
caaaaaaaaagaatt

SEQ ID NO: 33480 - DNA, 15 bp, Homo sapiens
aaaaaaaaagaattg

SEQ ID NO: 33481 - DNA, 15 bp, Homo sapiens
aaaaaaaagaattgg

SEQ ID NO: 33482 - DNA, 15 bp, Homo sapiens
aaaaaaagaattgga

SEQ ID NO: 33483 - DNA, 15 bp, Homo sapiens
aaaaaagaattggag

SEQ ID NO: 33484 - DNA, 15 bp, Homo sapiens
aaaaagaattggaga

SEQ ID NO: 33485 - DNA, 15 bp, Homo sapiens
aaaagaattggagaa

SEQ ID NO: 33486 - DNA, 15 bp, Homo sapiens
aaagaattggagaac

SEQ ID NO: 33487 - DNA, 15 bp, Homo sapiens
aagaattggagaact

SEQ ID NO: 33488 - DNA, 15 bp, Homo sapiens
agaattggagaactt

SEQ ID NO: 33489 - DNA, 15 bp, Homo sapiens
gaattggagaacttt

SEQ ID NO: 33490 - DNA, 15 bp, Homo sapiens
aattggagaacttta

SEQ ID NO: 33491 - DNA, 15 bp, Homo sapiens
attggagaactttac

SEQ ID NO: 33492 - DNA, 15 bp, Homo sapiens
ttggagaactttact

SEQ ID NO: 33493 - DNA, 15 bp, Homo sapiens
tggagaactttactt

SEQ ID NO: 33494 - DNA, 15 bp, Homo sapiens
ggagaactttacttt

SEQ ID NO: 33495 - DNA, 15 bp, Homo sapiens
gagaactttactttt

SEQ ID NO: 33496 - DNA, 15 bp, Homo sapiens
agaactttactttta

SEQ ID NO: 33497 - DNA, 15 bp, Homo sapiens
gaactttacttttaa

SEQ ID NO: 33498 - DNA, 15 bp, Homo sapiens
aactttacttttaaa

SEQ ID NO: 33499 - DNA, 15 bp, Homo sapiens
actttacttttaaat

SEQ ID NO: 33500 - DNA, 15 bp, Homo sapiens
ctttacttttaaatc

SEQ ID NO: 33501 - DNA, 15 bp, Homo sapiens
tttacttttaaatca

SEQ ID NO: 33502 - DNA, 15 bp, Homo sapiens
ttacttttaaatcag

SEQ ID NO: 33503 - DNA, 15 bp, Homo sapiens
tacttttaaatcagc

SEQ ID NO: 33504 - DNA, 15 bp, Homo sapiens
acttttaaatcagca

SEQ ID NO: 33505 - DNA, 15 bp, Homo sapiens
cttttaaatcagcag

SEQ ID NO: 33506 - DNA, 15 bp, Homo sapiens
ttttaaatcagcagc

SEQ ID NO: 33507 - DNA, 15 bp, Homo sapiens
tttaaatcagcagct

SEQ ID NO: 33508 - DNA, 15 bp, Homo sapiens
ttaaatcagcagcta

SEQ ID NO: 33509 - DNA, 15 bp, Homo sapiens
taaatcagcagctaa

SEQ ID NO: 33510 - DNA, 15 bp, Homo sapiens
aaatcagcagctaaa

SEQ ID NO: 33511 - DNA, 15 bp, Homo sapiens
aatcagcagctaaat

SEQ ID NO: 33512 - DNA, 15 bp, Homo sapiens
atcagcagctaaatg

SEQ ID NO: 33513 - DNA, 15 bp, Homo sapiens
tcagcagctaaatga

SEQ ID NO: 33514 - DNA, 15 bp, Homo sapiens
cagcagctaaatgaa

SEQ ID NO: 33515 - DNA, 15 bp, Homo sapiens
agcagctaaatgaag

SEQ ID NO: 33516 - DNA, 15 bp, Homo sapiens
gcagctaaatgaaga

SEQ ID NO: 33517 - DNA, 15 bp, Homo sapiens
cagctaaatgaagaa

SEQ ID NO: 33518 - DNA, 15 bp, Homo sapiens
agctaaatgaagaaa

SEQ ID NO: 33519 - DNA, 15 bp, Homo sapiens
gctaaatgaagaaaa

SEQ ID NO: 33520 - DNA, 15 bp, Homo sapiens
ctaaatgaagaaaac

SEQ ID NO: 33521 - DNA, 15 bp, Homo sapiens
taaatgaagaaaact

SEQ ID NO: 33522 - DNA, 15 bp, Homo sapiens
aaatgaagaaaactt

SEQ ID NO: 33523 - DNA, 15 bp, Homo sapiens
aatgaagaaaacttt

SEQ ID NO: 33524 - DNA, 15 bp, Homo sapiens
atgaagaaaactttt

SEQ ID NO: 33525 - DNA, 15 bp, Homo sapiens
tgaagaaaacttttc

SEQ ID NO: 33526 - DNA, 15 bp, Homo sapiens
gaagaaaacttttcc

SEQ ID NO: 33527 - DNA, 15 bp, Homo sapiens
aagaaaacttttcct

SEQ ID NO: 33528 - DNA, 15 bp, Homo sapiens
agaaaacttttcctt

SEQ ID NO: 33529 - DNA, 15 bp, Homo sapiens
gaaaacttttccttt

SEQ ID NO: 33530 - DNA, 15 bp, Homo sapiens
aaaacttttcctttc

SEQ ID NO: 33531 - DNA, 15 bp, Homo sapiens
aaacttttcctttct

SEQ ID NO: 33532 - DNA, 15 bp, Homo sapiens
aacttttcctttcta

SEQ ID NO: 33533 - DNA, 15 bp, Homo sapiens
acttttcctttctaa

SEQ ID NO: 33534 - DNA, 15 bp, Homo sapiens
cttttcctttctaaa

SEQ ID NO: 33535 - DNA, 15 bp, Homo sapiens
ttttcctttctaaaa

SEQ ID NO: 33536 - DNA, 15 bp, Homo sapiens
tttcctttctaaaaa

SEQ ID NO: 33537 - DNA, 15 bp, Homo sapiens
ttcctttctaaaaaa

SEQ ID NO: 33538 - DNA, 15 bp, Homo sapiens
tcctttctaaaaaaa

SEQ ID NO: 33539 - DNA, 15 bp, Homo sapiens
cctttctaaaaaaag

SEQ ID NO: 33540 - DNA, 15 bp, Homo sapiens
ctttctaaaaaaaga

SEQ ID NO: 33541 - DNA, 15 bp, Homo sapiens
tttctaaaaaaagat

SEQ ID NO: 33542 - DNA, 15 bp, Homo sapiens
ttctaaaaaaagatt

SEQ ID NO: 33543 - DNA, 15 bp, Homo sapiens
tctaaaaaaagatta

SEQ ID NO: 33544 - DNA, 15 bp, Homo sapiens
ctaaaaaaagattaa

SEQ ID NO: 33545 - DNA, 15 bp, Homo sapiens
taaaaaaagattaag

SEQ ID NO: 33546 - DNA, 15 bp, Homo sapiens
aaaaaaagattaaga

SEQ ID NO: 33547 - DNA, 15 bp, Homo sapiens
aaaaaagattaagaa

SEQ ID NO: 33548 - DNA, 15 bp, Homo sapiens
aaaaagattaagaat

SEQ ID NO: 33549 - DNA, 15 bp, Homo sapiens
aaaagattaagaatg

SEQ ID NO: 33550 - DNA, 15 bp, Homo sapiens
aaagattaagaatgt

SEQ ID NO: 33551 - DNA, 15 bp, Homo sapiens
aagattaagaatgta

SEQ ID NO: 33552 - DNA, 15 bp, Homo sapiens
agattaagaatgtaa

SEQ ID NO: 33553 - DNA, 15 bp, Homo sapiens
gattaagaatgtaaa

SEQ ID NO: 33554 - DNA, 15 bp, Homo sapiens
attaagaatgtaaaa

SEQ ID NO: 33555 - DNA, 15 bp, Homo sapiens
ttaagaatgtaaaag

SEQ ID NO: 33556 - DNA, 15 bp, Homo sapiens
taagaatgtaaaagt

SEQ ID NO: 33557 - DNA, 15 bp, Homo sapiens
aagaatgtaaaagta

SEQ ID NO: 33558 - DNA, 15 bp, Homo sapiens
agaatgtaaaagtac

SEQ ID NO: 33559 - DNA, 15 bp, Homo sapiens
gaatgtaaaagtaca

SEQ ID NO: 33560 - DNA, 15 bp, Homo sapiens
aatgtaaaagtacat

SEQ ID NO: 33561 - DNA, 15 bp, Homo sapiens
atgtaaaagtacatt

SEQ ID NO: 33562 - DNA, 15 bp, Homo sapiens
tgtaaaagtacattt

SEQ ID NO: 33563 - DNA, 15 bp, Homo sapiens
gtaaaagtacatttt

SEQ ID NO: 33564 - DNA, 15 bp, Homo sapiens
taaaagtacatttta

SEQ ID NO: 33565 - DNA, 15 bp, Homo sapiens
aaaagtacattttaa

SEQ ID NO: 33566 - DNA, 15 bp, Homo sapiens
aaagtacattttaat

SEQ ID NO: 33567 - DNA, 15 bp, Homo sapiens
aagtacattttaata

SEQ ID NO: 33568 - DNA, 15 bp, Homo sapiens
agtacattttaatat

SEQ ID NO: 33569 - DNA, 15 bp, Homo sapiens
gtacattttaatatt

SEQ ID NO: 33570 - DNA, 15 bp, Homo sapiens
tacattttaatatta

SEQ ID NO: 33571 - DNA, 15 bp, Homo sapiens
acattttaatattaa

SEQ ID NO: 33572 - DNA, 15 bp, Homo sapiens
cattttaatattaaa

SEQ ID NO: 33573 - DNA, 15 bp, Homo sapiens
attttaatattaaaa

SEQ ID NO: 33574 - DNA, 15 bp, Homo sapiens
ttttaatattaaaaa

SEQ ID NO: 33575 - DNA, 15 bp, Homo sapiens
tttaatattaaaaaa

SEQ ID NO: 33576 - DNA, 15 bp, Homo sapiens
ttaatattaaaaaag

SEQ ID NO: 33577 - DNA, 15 bp, Homo sapiens
taatattaaaaaagc

SEQ ID NO: 33578 - DNA, 15 bp, Homo sapiens
aatattaaaaaagca

SEQ ID NO: 33579 - DNA, 15 bp, Homo sapiens
atattaaaaaagcat

SEQ ID NO: 33580 - DNA, 15 bp, Homo sapiens
tattaaaaaagcatt

SEQ ID NO: 33581 - DNA, 15 bp, Homo sapiens
attaaaaaagcattt

SEQ ID NO: 33582 - DNA, 15 bp, Homo sapiens
ttaaaaaagcatttt

SEQ ID NO: 33583 - DNA, 15 bp, Homo sapiens
taaaaaagcatttta

SEQ ID NO: 33584 - DNA, 15 bp, Homo sapiens
aaaaaagcattttaa

SEQ ID NO: 33585 - DNA, 15 bp, Homo sapiens
aaaaagcattttaaa

SEQ ID NO: 33586 - DNA, 15 bp, Homo sapiens
aaaagcattttaaaa

SEQ ID NO: 33587 - DNA, 15 bp, Homo sapiens
aaagcattttaaaaa

SEQ ID NO: 33588 - DNA, 15 bp, Homo sapiens
aagcattttaaaaaa

SEQ ID NO: 33589 - DNA, 15 bp, Homo sapiens
agcattttaaaaaat

SEQ ID NO: 33590 - DNA, 15 bp, Homo sapiens
gcattttaaaaaatc

SEQ ID NO: 33591 - DNA, 15 bp, Homo sapiens
cattttaaaaaatct

SEQ ID NO: 33592 - DNA, 15 bp, Homo sapiens
attttaaaaaatcta

SEQ ID NO: 33593 - DNA, 15 bp, Homo sapiens
ttttaaaaaatctat

SEQ ID NO: 33594 - DNA, 15 bp, Homo sapiens
tttaaaaaatctata

SEQ ID NO: 33595 - DNA, 15 bp, Homo sapiens
ttaaaaaatctataa

SEQ ID NO: 33596 - DNA, 15 bp, Homo sapiens
taaaaaatctataac

SEQ ID NO: 33597 - DNA, 15 bp, Homo sapiens
aaaaaatctataaca

SEQ ID NO: 33598 - DNA, 15 bp, Homo sapiens
aaaaatctataacaa

SEQ ID NO: 33599 - DNA, 15 bp, Homo sapiens
aaaatctataacaac

SEQ ID NO: 33600 - DNA, 15 bp, Homo sapiens
aaatctataacaact

SEQ ID NO: 33601 - DNA, 15 bp, Homo sapiens
aatctataacaactt

SEQ ID NO: 33602 - DNA, 15 bp, Homo sapiens
atctataacaacttt

SEQ ID NO: 33603 - DNA, 15 bp, Homo sapiens
tctataacaacttta

SEQ ID NO: 33604 - DNA, 15 bp, Homo sapiens
ctataacaactttat

SEQ ID NO: 33605 - DNA, 15 bp, Homo sapiens
tataacaactttatg

SEQ ID NO: 33606 - DNA, 15 bp, Homo sapiens
ataacaactttatga

SEQ ID NO: 33607 - DNA, 15 bp, Homo sapiens
taacaactttatgac

SEQ ID NO: 33608 - DNA, 15 bp, Homo sapiens
aacaactttatgaca

SEQ ID NO: 33609 - DNA, 15 bp, Homo sapiens
acaactttatgacaa

SEQ ID NO: 33610 - DNA, 15 bp, Homo sapiens
caactttatgacaaa

SEQ ID NO: 33611 - DNA, 15 bp, Homo sapiens
aactttatgacaaaa

SEQ ID NO: 33612 - DNA, 15 bp, Homo sapiens
actttatgacaaaat

SEQ ID NO: 33613 - DNA, 15 bp, Homo sapiens
ctttatgacaaaatc

SEQ ID NO: 33614 - DNA, 15 bp, Homo sapiens
tttatgacaaaatct

SEQ ID NO: 33615 - DNA, 15 bp, Homo sapiens
ttatgacaaaatctg

SEQ ID NO: 33616 - DNA, 15 bp, Homo sapiens
tatgacaaaatctgc

SEQ ID NO: 33617 - DNA, 15 bp, Homo sapiens
atgacaaaatctgca

SEQ ID NO: 33618 - DNA, 15 bp, Homo sapiens
tgacaaaatctgcat

SEQ ID NO: 33619 - DNA, 15 bp, Homo sapiens
gacaaaatctgcatt

SEQ ID NO: 33620 - DNA, 15 bp, Homo sapiens
acaaaatctgcattt

SEQ ID NO: 33621 - DNA, 15 bp, Homo sapiens
caaaatctgcatttg

SEQ ID NO: 33622 - DNA, 15 bp, Homo sapiens
aaaatctgcatttga

SEQ ID NO: 33623 - DNA, 15 bp, Homo sapiens
aaatctgcatttgaa

SEQ ID NO: 33624 - DNA, 15 bp, Homo sapiens
aatctgcatttgaaa

SEQ ID NO: 33625 - DNA, 15 bp, Homo sapiens
atctgcatttgaaaa

SEQ ID NO: 33626 - DNA, 15 bp, Homo sapiens
tctgcatttgaaaaa

SEQ ID NO: 33627 - DNA, 15 bp, Homo sapiens
ctgcatttgaaaaag

SEQ ID NO: 33628 - DNA, 15 bp, Homo sapiens
tgcatttgaaaaagg

SEQ ID NO: 33629 - DNA, 15 bp, Homo sapiens
gcatttgaaaaaggc

SEQ ID NO: 33630 - DNA, 15 bp, Homo sapiens
catttgaaaaaggcc

SEQ ID NO: 33631 - DNA, 15 bp, Homo sapiens
atttgaaaaaggcct

SEQ ID NO: 33632 - DNA, 15 bp, Homo sapiens
tttgaaaaaggcctg

SEQ ID NO: 33633 - DNA, 15 bp, Homo sapiens
ttgaaaaaggcctgt

SEQ ID NO: 33634 - DNA, 15 bp, Homo sapiens
tgaaaaaggcctgta

SEQ ID NO: 33635 - DNA, 15 bp, Homo sapiens
gaaaaaggcctgtaa

SEQ ID NO: 33636 - DNA, 15 bp, Homo sapiens
aaaaaggcctgtaaa

SEQ ID NO: 33637 - DNA, 15 bp, Homo sapiens
aaaaggcctgtaaaa

SEQ ID NO: 33638 - DNA, 15 bp, Homo sapiens
aaaggcctgtaaaaa

SEQ ID NO: 33639 - DNA, 15 bp, Homo sapiens
aaggcctgtaaaaac

SEQ ID NO: 33640 - DNA, 15 bp, Homo sapiens
aggcctgtaaaaaca

SEQ ID NO: 33641 - DNA, 15 bp, Homo sapiens
ggcctgtaaaaacag

SEQ ID NO: 33642 - DNA, 15 bp, Homo sapiens
gcctgtaaaaacagt

SEQ ID NO: 33643 - DNA, 15 bp, Homo sapiens
cctgtaaaaacagta

SEQ ID NO: 33644 - DNA, 15 bp, Homo sapiens
ctgtaaaaacagtag

SEQ ID NO: 33645 - DNA, 15 bp, Homo sapiens
tgtaaaaacagtagg

SEQ ID NO: 33646 - DNA, 15 bp, Homo sapiens
gtaaaaacagtagga

SEQ ID NO: 33647 - DNA, 15 bp, Homo sapiens
taaaaacagtaggac

SEQ ID NO: 33648 - DNA, 15 bp, Homo sapiens
aaaaacagtaggaca

SEQ ID NO: 33649 - DNA, 15 bp, Homo sapiens
aaaacagtaggacag

SEQ ID NO: 33650 - DNA, 15 bp, Homo sapiens
aaacagtaggacaga

SEQ ID NO: 33651 - DNA, 15 bp, Homo sapiens
aacagtaggacagaa

SEQ ID NO: 33652 - DNA, 15 bp, Homo sapiens
acagtaggacagaat

SEQ ID NO: 33653 - DNA, 15 bp, Homo sapiens
cagtaggacagaatt

SEQ ID NO: 33654 - DNA, 15 bp, Homo sapiens
agtaggacagaattg

SEQ ID NO: 33655 - DNA, 15 bp, Homo sapiens
gtaggacagaattgc

SEQ ID NO: 33656 - DNA, 15 bp, Homo sapiens
taggacagaattgcc

SEQ ID NO: 33657 - DNA, 15 bp, Homo sapiens
aggacagaattgccc

SEQ ID NO: 33658 - DNA, 15 bp, Homo sapiens
ggacagaattgccct

SEQ ID NO: 33659 - DNA, 15 bp, Homo sapiens
gacagaattgccctc

SEQ ID NO: 33660 - DNA, 15 bp, Homo sapiens
acagaattgccctca

SEQ ID NO: 33661 - DNA, 15 bp, Homo sapiens
cagaattgccctcat

SEQ ID NO: 33662 - DNA, 15 bp, Homo sapiens
agaattgccctcatc

SEQ ID NO: 33663 - DNA, 15 bp, Homo sapiens
gaattgccctcatca

SEQ ID NO: 33664 - DNA, 15 bp, Homo sapiens
aattgccctcatcac

SEQ ID NO: 33665 - DNA, 15 bp, Homo sapiens
attgccctcatcacc

SEQ ID NO: 33666 - DNA, 15 bp, Homo sapiens
ttgccctcatcacct

SEQ ID NO: 33667 - DNA, 15 bp, Homo sapiens
tgccctcatcacctt

SEQ ID NO: 33668 - DNA, 15 bp, Homo sapiens
gccctcatcaccttt

SEQ ID NO: 33669 - DNA, 15 bp, Homo sapiens
ccctcatcacctttt

SEQ ID NO: 33670 - DNA, 15 bp, Homo sapiens
cctcatcacctttta

SEQ ID NO: 33671 - DNA, 15 bp, Homo sapiens
ctcatcaccttttac

SEQ ID NO: 33672 - DNA, 15 bp, Homo sapiens
tcatcaccttttact

SEQ ID NO: 33673 - DNA, 15 bp, Homo sapiens
catcaccttttactt

SEQ ID NO: 33674 - DNA, 15 bp, Homo sapiens
atcaccttttacttt

SEQ ID NO: 33675 - DNA, 15 bp, Homo sapiens
tcaccttttactttt

SEQ ID NO: 33676 - DNA, 15 bp, Homo sapiens
caccttttacttttt

SEQ ID NO: 33677 - DNA, 15 bp, Homo sapiens
accttttactttttc

SEQ ID NO: 33678 - DNA, 15 bp, Homo sapiens
ccttttactttttct

SEQ ID NO: 33679 - DNA, 15 bp, Homo sapiens
cttttactttttctt

SEQ ID NO: 33680 - DNA, 15 bp, Homo sapiens
ttttactttttcttg

SEQ ID NO: 33681 - DNA, 15 bp, Homo sapiens
tttactttttcttgt

SEQ ID NO: 33682 - DNA, 15 bp, Homo sapiens
ttactttttcttgtc

SEQ ID NO: 33683 - DNA, 15 bp, Homo sapiens
tactttttcttgtca

SEQ ID NO: 33684 - DNA, 15 bp, Homo sapiens
actttttcttgtcag

SEQ ID NO: 33685 - DNA, 15 bp, Homo sapiens
ctttttcttgtcaga

SEQ ID NO: 33686 - DNA, 15 bp, Homo sapiens
tttttcttgtcagaa

SEQ ID NO: 33687 - DNA, 15 bp, Homo sapiens
ttttcttgtcagaaa

SEQ ID NO: 33688 - DNA, 15 bp, Homo sapiens
tttcttgtcagaaaa

SEQ ID NO: 33689 - DNA, 15 bp, Homo sapiens
ttcttgtcagaaaaa

SEQ ID NO: 33690 - DNA, 15 bp, Homo sapiens
tcttgtcagaaaaaa

SEQ ID NO: 33691 - DNA, 15 bp, Homo sapiens
cttgtcagaaaaaag

SEQ ID NO: 33692 - DNA, 15 bp, Homo sapiens
ttgtcagaaaaaagt

SEQ ID NO: 33693 - DNA, 15 bp, Homo sapiens
tgtcagaaaaaagtg

SEQ ID NO: 33694 - DNA, 15 bp, Homo sapiens
gtcagaaaaaagtgt

SEQ ID NO: 33695 - DNA, 15 bp, Homo sapiens
tcagaaaaaagtgta

SEQ ID NO: 33696 - DNA, 15 bp, Homo sapiens
cagaaaaaagtgtat

SEQ ID NO: 33697 - DNA, 15 bp, Homo sapiens
agaaaaaagtgtatg

SEQ ID NO: 33698 - DNA, 15 bp, Homo sapiens
gaaaaaagtgtatgc

SEQ ID NO: 33699 - DNA, 15 bp, Homo sapiens
aaaaaagtgtatgca

SEQ ID NO: 33700 - DNA, 15 bp, Homo sapiens
aaaaagtgtatgcat

SEQ ID NO: 33701 - DNA, 15 bp, Homo sapiens
aaaagtgtatgcatc

SEQ ID NO: 33702 - DNA, 15 bp, Homo sapiens
aaagtgtatgcatct

SEQ ID NO: 33703 - DNA, 15 bp, Homo sapiens
aagtgtatgcatctc

SEQ ID NO: 33704 - DNA, 15 bp, Homo sapiens
agtgtatgcatctct

SEQ ID NO: 33705 - DNA, 15 bp, Homo sapiens
gtgtatgcatctctg

SEQ ID NO: 33706 - DNA, 15 bp, Homo sapiens
tgtatgcatctctgg

SEQ ID NO: 33707 - DNA, 15 bp, Homo sapiens
gtatgcatctctgga

SEQ ID NO: 33708 - DNA, 15 bp, Homo sapiens
tatgcatctctggaa

SEQ ID NO: 33709 - DNA, 15 bp, Homo sapiens
atgcatctctggaac

SEQ ID NO: 33710 - DNA, 15 bp, Homo sapiens
tgcatctctggaacc

SEQ ID NO: 33711 - DNA, 15 bp, Homo sapiens
gcatctctggaacca

SEQ ID NO: 33712 - DNA, 15 bp, Homo sapiens
catctctggaaccat

SEQ ID NO: 33713 - DNA, 15 bp, Homo sapiens
atctctggaaccata

SEQ ID NO: 33714 - DNA, 15 bp, Homo sapiens
tctctggaaccataa

SEQ ID NO: 33715 - DNA, 15 bp, Homo sapiens
ctctggaaccataaa

SEQ ID NO: 33716 - DNA, 15 bp, Homo sapiens
tctggaaccataaat

SEQ ID NO: 33717 - DNA, 15 bp, Homo sapiens
ctggaaccataaatg

SEQ ID NO: 33718 - DNA, 15 bp, Homo sapiens
tggaaccataaatga

SEQ ID NO: 33719 - DNA, 15 bp, Homo sapiens
ggaaccataaatgat

SEQ ID NO: 33720 - DNA, 15 bp, Homo sapiens
gaaccataaatgatg

SEQ ID NO: 33721 - DNA, 15 bp, Homo sapiens
aaccataaatgatgt

SEQ ID NO: 33722 - DNA, 15 bp, Homo sapiens
accataaatgatgtt

SEQ ID NO: 33723 - DNA, 15 bp, Homo sapiens
ccataaatgatgtta

SEQ ID NO: 33724 - DNA, 15 bp, Homo sapiens
cataaatgatgttaa

SEQ ID NO: 33725 - DNA, 15 bp, Homo sapiens
ataaatgatgttaaa

SEQ ID NO: 33726 - DNA, 15 bp, Homo sapiens
taaatgatgttaaaa

SEQ ID NO: 33727 - DNA, 15 bp, Homo sapiens
aaatgatgttaaaat

SEQ ID NO: 33728 - DNA, 15 bp, Homo sapiens
aatgatgttaaaata

SEQ ID NO: 33729 - DNA, 15 bp, Homo sapiens
atgatgttaaaatag

SEQ ID NO: 33730 - DNA, 15 bp, Homo sapiens
tgatgttaaaatagg

SEQ ID NO: 33731 - DNA, 15 bp, Homo sapiens
gatgttaaaataggc

SEQ ID NO: 33732 - DNA, 15 bp, Homo sapiens
atgttaaaataggca

SEQ ID NO: 33733 - DNA, 15 bp, Homo sapiens
tgttaaaataggcat

SEQ ID NO: 33734 - DNA, 15 bp, Homo sapiens
gttaaaataggcatt

SEQ ID NO: 33735 - DNA, 15 bp, Homo sapiens
ttaaaataggcattt

SEQ ID NO: 33736 - DNA, 15 bp, Homo sapiens
taaaataggcattta

SEQ ID NO: 33737 - DNA, 15 bp, Homo sapiens
aaaataggcatttat

SEQ ID NO: 33738 - DNA, 15 bp, Homo sapiens
aaataggcatttata

SEQ ID NO: 33739 - DNA, 15 bp, Homo sapiens
aataggcatttataa

SEQ ID NO: 33740 - DNA, 15 bp, Homo sapiens
ataggcatttataaa

SEQ ID NO: 33741 - DNA, 15 bp, Homo sapiens
taggcatttataaaa

SEQ ID NO: 33742 - DNA, 15 bp, Homo sapiens
aggcatttataaaat

SEQ ID NO: 33743 - DNA, 15 bp, Homo sapiens
ggcatttataaaatg

SEQ ID NO: 33744 - DNA, 15 bp, Homo sapiens
gcatttataaaatga

SEQ ID NO: 33745 - DNA, 15 bp, Homo sapiens
catttataaaatgac

SEQ ID NO: 33746 - DNA, 15 bp, Homo sapiens
atttataaaatgaca

SEQ ID NO: 33747 - DNA, 15 bp, Homo sapiens
tttataaaatgacaa

SEQ ID NO: 33748 - DNA, 15 bp, Homo sapiens
ttataaaatgacaag

SEQ ID NO: 33749 - DNA, 15 bp, Homo sapiens
tataaaatgacaagg

SEQ ID NO: 33750 - DNA, 15 bp, Homo sapiens
ataaaatgacaagga

SEQ ID NO: 33751 - DNA, 15 bp, Homo sapiens
taaaatgacaaggag

SEQ ID NO: 33752 - DNA, 15 bp, Homo sapiens
aaaatgacaaggaga

SEQ ID NO: 33753 - DNA, 15 bp, Homo sapiens
aaatgacaaggagaa

SEQ ID NO: 33754 - DNA, 15 bp, Homo sapiens
aatgacaaggagaat

SEQ ID NO: 33755 - DNA, 15 bp, Homo sapiens
atgacaaggagaatt

SEQ ID NO: 33756 - DNA, 15 bp, Homo sapiens
tgacaaggagaattt

SEQ ID NO: 33757 - DNA, 15 bp, Homo sapiens
gacaaggagaatttc

SEQ ID NO: 33758 - DNA, 15 bp, Homo sapiens
acaaggagaatttca

SEQ ID NO: 33759 - DNA, 15 bp, Homo sapiens
caaggagaatttcat

SEQ ID NO: 33760 - DNA, 15 bp, Homo sapiens
aaggagaatttcatg

SEQ ID NO: 33761 - DNA, 15 bp, Homo sapiens
aggagaatttcatga

SEQ ID NO: 33762 - DNA, 15 bp, Homo sapiens
ggagaatttcatgat

SEQ ID NO: 33763 - DNA, 15 bp, Homo sapiens
gagaatttcatgata

SEQ ID NO: 33764 - DNA, 15 bp, Homo sapiens
agaatttcatgataa

SEQ ID NO: 33765 - DNA, 15 bp, Homo sapiens
gaatttcatgataaa

SEQ ID NO: 33766 - DNA, 15 bp, Homo sapiens
aatttcatgataaat

SEQ ID NO: 33767 - DNA, 15 bp, Homo sapiens
atttcatgataaatt

SEQ ID NO: 33768 - DNA, 15 bp, Homo sapiens
tttcatgataaattt

SEQ ID NO: 33769 - DNA, 15 bp, Homo sapiens
ttcatgataaatttg

SEQ ID NO: 33770 - DNA, 15 bp, Homo sapiens
tcatgataaatttgt

SEQ ID NO: 33771 - DNA, 15 bp, Homo sapiens
catgataaatttgtt

SEQ ID NO: 33772 - DNA, 15 bp, Homo sapiens
atgataaatttgttt

SEQ ID NO: 33773 - DNA, 15 bp, Homo sapiens
tgataaatttgtttg

SEQ ID NO: 33774 - DNA, 15 bp, Homo sapiens
gataaatttgtttgt

SEQ ID NO: 33775 - DNA, 15 bp, Homo sapiens
ataaatttgtttgtt

SEQ ID NO: 33776 - DNA, 15 bp, Homo sapiens
taaatttgtttgttt

SEQ ID NO: 33777 - DNA, 15 bp, Homo sapiens
aaatttgtttgtttt

SEQ ID NO: 33778 - DNA, 15 bp, Homo sapiens
aatttgtttgttttc

SEQ ID NO: 33779 - DNA, 15 bp, Homo sapiens
atttgtttgttttct

SEQ ID NO: 33780 - DNA, 15 bp, Homo sapiens
tttgtttgttttctt

SEQ ID NO: 33781 - DNA, 15 bp, Homo sapiens
ttgtttgttttctta

SEQ ID NO: 33782 - DNA, 15 bp, Homo sapiens
tgtttgttttcttac

SEQ ID NO: 33783 - DNA, 15 bp, Homo sapiens
gtttgttttcttaca

SEQ ID NO: 33784 - DNA, 15 bp, Homo sapiens
tttgttttcttacaa

SEQ ID NO: 33785 - DNA, 15 bp, Homo sapiens
ttgttttcttacaat

SEQ ID NO: 33786 - DNA, 15 bp, Homo sapiens
tgttttcttacaatc

SEQ ID NO: 33787 - DNA, 15 bp, Homo sapiens
gttttcttacaatca

SEQ ID NO: 33788 - DNA, 15 bp, Homo sapiens
ttttcttacaatcat

SEQ ID NO: 33789 - DNA, 15 bp, Homo sapiens
tttcttacaatcatt

SEQ ID NO: 33790 - DNA, 15 bp, Homo sapiens
ttcttacaatcattg

SEQ ID NO: 33791 - DNA, 15 bp, Homo sapiens
tcttacaatcattgg

SEQ ID NO: 33792 - DNA, 15 bp, Homo sapiens
cttacaatcattggc

SEQ ID NO: 33793 - DNA, 15 bp, Homo sapiens
ttacaatcattggca

SEQ ID NO: 33794 - DNA, 15 bp, Homo sapiens
tacaatcattggcat

SEQ ID NO: 33795 - DNA, 15 bp, Homo sapiens
acaatcattggcatt

SEQ ID NO: 33796 - DNA, 15 bp, Homo sapiens
caatcattggcattg

SEQ ID NO: 33797 - DNA, 15 bp, Homo sapiens
aatcattggcattgc

SEQ ID NO: 33798 - DNA, 15 bp, Homo sapiens
atcattggcattgca

SEQ ID NO: 33799 - DNA, 15 bp, Homo sapiens
tcattggcattgcag

SEQ ID NO: 33800 - DNA, 15 bp, Homo sapiens
cattggcattgcagc

SEQ ID NO: 33801 - DNA, 15 bp, Homo sapiens
attggcattgcagcc

SEQ ID NO: 33802 - DNA, 15 bp, Homo sapiens
ttggcattgcagcca

SEQ ID NO: 33803 - DNA, 15 bp, Homo sapiens
tggcattgcagccat

SEQ ID NO: 33804 - DNA, 15 bp, Homo sapiens
ggcattgcagccatt

SEQ ID NO: 33805 - DNA, 15 bp, Homo sapiens
gcattgcagccatta

SEQ ID NO: 33806 - DNA, 15 bp, Homo sapiens
cattgcagccattag

SEQ ID NO: 33807 - DNA, 15 bp, Homo sapiens
attgcagccattagt

SEQ ID NO: 33808 - DNA, 15 bp, Homo sapiens
ttgcagccattagta

SEQ ID NO: 33809 - DNA, 15 bp, Homo sapiens
tgcagccattagtaa

SEQ ID NO: 33810 - DNA, 15 bp, Homo sapiens
gcagccattagtaag

SEQ ID NO: 33811 - DNA, 15 bp, Homo sapiens
cagccattagtaagt

SEQ ID NO: 33812 - DNA, 15 bp, Homo sapiens
agccattagtaagtc

SEQ ID NO: 33813 - DNA, 15 bp, Homo sapiens
gccattagtaagtca

SEQ ID NO: 33814 - DNA, 15 bp, Homo sapiens
ccattagtaagtcac

SEQ ID NO: 33815 - DNA, 15 bp, Homo sapiens
cattagtaagtcaca

SEQ ID NO: 33816 - DNA, 15 bp, Homo sapiens
attagtaagtcacaa

SEQ ID NO: 33817 - DNA, 15 bp, Homo sapiens
ttagtaagtcacaag

SEQ ID NO: 33818 - DNA, 15 bp, Homo sapiens
tagtaagtcacaagg

SEQ ID NO: 33819 - DNA, 15 bp, Homo sapiens
agtaagtcacaagga

SEQ ID NO: 33820 - DNA, 15 bp, Homo sapiens
gtaagtcacaaggaa

SEQ ID NO: 33821 - DNA, 15 bp, Homo sapiens
taagtcacaaggaaa

SEQ ID NO: 33822 - DNA, 15 bp, Homo sapiens
aagtcacaaggaaaa

SEQ ID NO: 33823 - DNA, 15 bp, Homo sapiens
agtcacaaggaaaac

SEQ ID NO: 33824 - DNA, 15 bp, Homo sapiens
gtcacaaggaaaact

SEQ ID NO: 33825 - DNA, 15 bp, Homo sapiens
tcacaaggaaaactt

SEQ ID NO: 33826 - DNA, 15 bp, Homo sapiens
cacaaggaaaacttc

SEQ ID NO: 33827 - DNA, 15 bp, Homo sapiens
acaaggaaaacttct

SEQ ID NO: 33828 - DNA, 15 bp, Homo sapiens
caaggaaaacttctc

SEQ ID NO: 33829 - DNA, 15 bp, Homo sapiens
aaggaaaacttctct

SEQ ID NO: 33830 - DNA, 15 bp, Homo sapiens
aggaaaacttctcta

SEQ ID NO: 33831 - DNA, 15 bp, Homo sapiens
ggaaaacttctctag

SEQ ID NO: 33832 - DNA, 15 bp, Homo sapiens
gaaaacttctctagc

SEQ ID NO: 33833 - DNA, 15 bp, Homo sapiens
aaaacttctctagct

SEQ ID NO: 33834 - DNA, 15 bp, Homo sapiens
aaacttctctagcta

SEQ ID NO: 33835 - DNA, 15 bp, Homo sapiens
aacttctctagctaa

SEQ ID NO: 33836 - DNA, 15 bp, Homo sapiens
acttctctagctaaa

SEQ ID NO: 33837 - DNA, 15 bp, Homo sapiens
cttctctagctaaaa

SEQ ID NO: 33838 - DNA, 15 bp, Homo sapiens
ttctctagctaaaac

SEQ ID NO: 33839 - DNA, 15 bp, Homo sapiens
tctctagctaaaacg

SEQ ID NO: 33840 - DNA, 15 bp, Homo sapiens
ctctagctaaaacgc

SEQ ID NO: 33841 - DNA, 15 bp, Homo sapiens
tctagctaaaacgca

SEQ ID NO: 33842 - DNA, 15 bp, Homo sapiens
ctagctaaaacgcaa

SEQ ID NO: 33843 - DNA, 15 bp, Homo sapiens
tagctaaaacgcaaa

SEQ ID NO: 33844 - DNA, 15 bp, Homo sapiens
agctaaaacgcaaaa

SEQ ID NO: 33845 - DNA, 15 bp, Homo sapiens
gctaaaacgcaaaat

SEQ ID NO: 33846 - DNA, 15 bp, Homo sapiens
ctaaaacgcaaaatg

SEQ ID NO: 33847 - DNA, 15 bp, Homo sapiens
taaaacgcaaaatga

SEQ ID NO: 33848 - DNA, 15 bp, Homo sapiens
aaaacgcaaaatgaa

SEQ ID NO: 33849 - DNA, 15 bp, Homo sapiens
aaacgcaaaatgaaa

SEQ ID NO: 33850 - DNA, 15 bp, Homo sapiens
aacgcaaaatgaaat

SEQ ID NO: 33851 - DNA, 15 bp, Homo sapiens
acgcaaaatgaaata

SEQ ID NO: 33852 - DNA, 15 bp, Homo sapiens
cgcaaaatgaaatat

SEQ ID NO: 33853 - DNA, 15 bp, Homo sapiens
gcaaaatgaaatatc

SEQ ID NO: 33854 - DNA, 15 bp, Homo sapiens
caaaatgaaatatca

SEQ ID NO: 33855 - DNA, 15 bp, Homo sapiens
aaaatgaaatatcaa

SEQ ID NO: 33856 - DNA, 15 bp, Homo sapiens
aaatgaaatatcaag

SEQ ID NO: 33857 - DNA, 15 bp, Homo sapiens
aatgaaatatcaagt

SEQ ID NO: 33858 - DNA, 15 bp, Homo sapiens
atgaaatatcaagtt

SEQ ID NO: 33859 - DNA, 15 bp, Homo sapiens
tgaaatatcaagttt

SEQ ID NO: 33860 - DNA, 15 bp, Homo sapiens
gaaatatcaagtttt

SEQ ID NO: 33861 - DNA, 15 bp, Homo sapiens
aaatatcaagttttg

SEQ ID NO: 33862 - DNA, 15 bp, Homo sapiens
aatatcaagttttga

SEQ ID NO: 33863 - DNA, 15 bp, Homo sapiens
atatcaagttttgaa

SEQ ID NO: 33864 - DNA, 15 bp, Homo sapiens
tatcaagttttgaaa

SEQ ID NO: 33865 - DNA, 15 bp, Homo sapiens
atcaagttttgaaat

SEQ ID NO: 33866 - DNA, 15 bp, Homo sapiens
tcaagttttgaaatg

SEQ ID NO: 33867 - DNA, 15 bp, Homo sapiens
caagttttgaaatgt

SEQ ID NO: 33868 - DNA, 15 bp, Homo sapiens
aagttttgaaatgta

SEQ ID NO: 33869 - DNA, 15 bp, Homo sapiens
agttttgaaatgtat

SEQ ID NO: 33870 - DNA, 15 bp, Homo sapiens
gttttgaaatgtatt

SEQ ID NO: 33871 - DNA, 15 bp, Homo sapiens
ttttgaaatgtatta

SEQ ID NO: 33872 - DNA, 15 bp, Homo sapiens
tttgaaatgtattag

SEQ ID NO: 33873 - DNA, 15 bp, Homo sapiens
ttgaaatgtattagg

SEQ ID NO: 33874 - DNA, 15 bp, Homo sapiens
tgaaatgtattaggt

SEQ ID NO: 33875 - DNA, 15 bp, Homo sapiens
gaaatgtattaggtc

SEQ ID NO: 33876 - DNA, 15 bp, Homo sapiens
aaatgtattaggtct

SEQ ID NO: 33877 - DNA, 15 bp, Homo sapiens
aatgtattaggtctg

SEQ ID NO: 33878 - DNA, 15 bp, Homo sapiens
atgtattaggtctgt

SEQ ID NO: 33879 - DNA, 15 bp, Homo sapiens
tgtattaggtctgtt

SEQ ID NO: 33880 - DNA, 15 bp, Homo sapiens
gtattaggtctgttg

SEQ ID NO: 33881 - DNA, 15 bp, Homo sapiens
tattaggtctgttgc

SEQ ID NO: 33882 - DNA, 15 bp, Homo sapiens
attaggtctgttgcc

SEQ ID NO: 33883 - DNA, 15 bp, Homo sapiens
ttaggtctgttgcct

SEQ ID NO: 33884 - DNA, 15 bp, Homo sapiens
taggtctgttgcctg

SEQ ID NO: 33885 - DNA, 15 bp, Homo sapiens
aggtctgttgcctgc

SEQ ID NO: 33886 - DNA, 15 bp, Homo sapiens
ggtctgttgcctgcg

SEQ ID NO: 33887 - DNA, 15 bp, Homo sapiens
gtctgttgcctgcgt

SEQ ID NO: 33888 - DNA, 15 bp, Homo sapiens
tctgttgcctgcgtt

SEQ ID NO: 33889 - DNA, 15 bp, Homo sapiens
ctgttgcctgcgttt

SEQ ID NO: 33890 - DNA, 15 bp, Homo sapiens
tgttgcctgcgtttt

SEQ ID NO: 33891 - DNA, 15 bp, Homo sapiens
gttgcctgcgttttg

SEQ ID NO: 33892 - DNA, 15 bp, Homo sapiens
ttgcctgcgttttgc

SEQ ID NO: 33893 - DNA, 15 bp, Homo sapiens
tgcctgcgttttgct

SEQ ID NO: 33894 - DNA, 15 bp, Homo sapiens
gcctgcgttttgctg

SEQ ID NO: 33895 - DNA, 15 bp, Homo sapiens
cctgcgttttgctga

SEQ ID NO: 33896 - DNA, 15 bp, Homo sapiens
ctgcgttttgctgat

SEQ ID NO: 33897 - DNA, 15 bp, Homo sapiens
tgcgttttgctgatc

SEQ ID NO: 33898 - DNA, 15 bp, Homo sapiens
gcgttttgctgatct

SEQ ID NO: 33899 - DNA, 15 bp, Homo sapiens
cgttttgctgatctc

SEQ ID NO: 33900 - DNA, 15 bp, Homo sapiens
gttttgctgatctca

SEQ ID NO: 33901 - DNA, 15 bp, Homo sapiens
ttttgctgatctcat

SEQ ID NO: 33902 - DNA, 15 bp, Homo sapiens
tttgctgatctcatt

SEQ ID NO: 33903 - DNA, 15 bp, Homo sapiens
ttgctgatctcattt

SEQ ID NO: 33904 - DNA, 15 bp, Homo sapiens
tgctgatctcatttt

SEQ ID NO: 33905 - DNA, 15 bp, Homo sapiens
gctgatctcattttt

SEQ ID NO: 33906 - DNA, 15 bp, Homo sapiens
ctgatctcatttttt

SEQ ID NO: 33907 - DNA, 15 bp, Homo sapiens
tgatctcattttttc

SEQ ID NO: 33908 - DNA, 15 bp, Homo sapiens
gatctcattttttca

SEQ ID NO: 33909 - DNA, 15 bp, Homo sapiens
atctcattttttcaa

SEQ ID NO: 33910 - DNA, 15 bp, Homo sapiens
tctcattttttcaaa

SEQ ID NO: 33911 - DNA, 15 bp, Homo sapiens
ctcattttttcaaag

SEQ ID NO: 33912 - DNA, 15 bp, Homo sapiens
tcattttttcaaagc

SEQ ID NO: 33913 - DNA, 15 bp, Homo sapiens
cattttttcaaagcg

SEQ ID NO: 33914 - DNA, 15 bp, Homo sapiens
attttttcaaagcgc

SEQ ID NO: 33915 - DNA, 15 bp, Homo sapiens
ttttttcaaagcgcg

SEQ ID NO: 33916 - DNA, 15 bp, Homo sapiens
tttttcaaagcgcga

SEQ ID NO: 33917 - DNA, 15 bp, Homo sapiens
ttttcaaagcgcgac

SEQ ID NO: 33918 - DNA, 15 bp, Homo sapiens
tttcaaagcgcgact

SEQ ID NO: 33919 - DNA, 15 bp, Homo sapiens
ttcaaagcgcgactc

SEQ ID NO: 33920 - DNA, 15 bp, Homo sapiens
tcaaagcgcgactcc

SEQ ID NO: 33921 - DNA, 15 bp, Homo sapiens
caaagcgcgactcca

SEQ ID NO: 33922 - DNA, 15 bp, Homo sapiens
aaagcgcgactccat

SEQ ID NO: 33923 - DNA, 15 bp, Homo sapiens
aagcgcgactccatt

SEQ ID NO: 33924 - DNA, 15 bp, Homo sapiens
agcgcgactccattt

SEQ ID NO: 33925 - DNA, 15 bp, Homo sapiens
gcgcgactccatttc

SEQ ID NO: 33926 - DNA, 15 bp, Homo sapiens
cgcgactccatttct

SEQ ID NO: 33927 - DNA, 15 bp, Homo sapiens
gcgactccatttctt

SEQ ID NO: 33928 - DNA, 15 bp, Homo sapiens
cgactccatttcttc

SEQ ID NO: 33929 - DNA, 15 bp, Homo sapiens
gactccatttcttct

SEQ ID NO: 33930 - DNA, 15 bp, Homo sapiens
actccatttcttcta

SEQ ID NO: 33931 - DNA, 15 bp, Homo sapiens
ctccatttcttctaa

SEQ ID NO: 33932 - DNA, 15 bp, Homo sapiens
tccatttcttctaag

SEQ ID NO: 33933 - DNA, 15 bp, Homo sapiens
ccatttcttctaaga

SEQ ID NO: 33934 - DNA, 15 bp, Homo sapiens
catttcttctaagac

SEQ ID NO: 33935 - DNA, 15 bp, Homo sapiens
atttcttctaagact

SEQ ID NO: 33936 - DNA, 15 bp, Homo sapiens
tttcttctaagactt

SEQ ID NO: 33937 - DNA, 15 bp, Homo sapiens
ttcttctaagacttt

SEQ ID NO: 33938 - DNA, 15 bp, Homo sapiens
tcttctaagactttg

SEQ ID NO: 33939 - DNA, 15 bp, Homo sapiens
cttctaagactttgg

SEQ ID NO: 33940 - DNA, 15 bp, Homo sapiens
ttctaagactttggg

SEQ ID NO: 33941 - DNA, 15 bp, Homo sapiens
tctaagactttgggt

SEQ ID NO: 33942 - DNA, 15 bp, Homo sapiens
ctaagactttgggtg

SEQ ID NO: 33943 - DNA, 15 bp, Homo sapiens
taagactttgggtgt

SEQ ID NO: 33944 - DNA, 15 bp, Homo sapiens
aagactttgggtgtg

SEQ ID NO: 33945 - DNA, 15 bp, Homo sapiens
agactttgggtgtgt

SEQ ID NO: 33946 - DNA, 15 bp, Homo sapiens
gactttgggtgtgta

SEQ ID NO: 33947 - DNA, 15 bp, Homo sapiens
actttgggtgtgtat

SEQ ID NO: 33948 - DNA, 15 bp, Homo sapiens
ctttgggtgtgtatc

SEQ ID NO: 33949 - DNA, 15 bp, Homo sapiens
tttgggtgtgtatcg

SEQ ID NO: 33950 - DNA, 15 bp, Homo sapiens
ttgggtgtgtatcgt

SEQ ID NO: 33951 - DNA, 15 bp, Homo sapiens
tgggtgtgtatcgta

SEQ ID NO: 33952 - DNA, 15 bp, Homo sapiens
gggtgtgtatcgtac

SEQ ID NO: 33953 - DNA, 15 bp, Homo sapiens
ggtgtgtatcgtacc

SEQ ID NO: 33954 - DNA, 15 bp, Homo sapiens
gtgtgtatcgtacca

SEQ ID NO: 33955 - DNA, 15 bp, Homo sapiens
tgtgtatcgtaccac

SEQ ID NO: 33956 - DNA, 15 bp, Homo sapiens
gtgtatcgtaccact

SEQ ID NO: 33957 - DNA, 15 bp, Homo sapiens
tgtatcgtaccacta

SEQ ID NO: 33958 - DNA, 15 bp, Homo sapiens
gtatcgtaccactaa

SEQ ID NO: 33959 - DNA, 15 bp, Homo sapiens
tatcgtaccactaat

SEQ ID NO: 33960 - DNA, 15 bp, Homo sapiens
atcgtaccactaatt

SEQ ID NO: 33961 - DNA, 15 bp, Homo sapiens
tcgtaccactaattt

SEQ ID NO: 33962 - DNA, 15 bp, Homo sapiens
cgtaccactaattta

SEQ ID NO: 33963 - DNA, 15 bp, Homo sapiens
gtaccactaatttaa

SEQ ID NO: 33964 - DNA, 15 bp, Homo sapiens
taccactaatttaac

SEQ ID NO: 33965 - DNA, 15 bp, Homo sapiens
accactaatttaacc

SEQ ID NO: 33966 - DNA, 15 bp, Homo sapiens
ccactaatttaacct

SEQ ID NO: 33967 - DNA, 15 bp, Homo sapiens
cactaatttaacctt

SEQ ID NO: 33968 - DNA, 15 bp, Homo sapiens
actaatttaaccttt

SEQ ID NO: 33969 - DNA, 15 bp, Homo sapiens
ctaatttaacctttc

SEQ ID NO: 33970 - DNA, 15 bp, Homo sapiens
taatttaacctttcc

SEQ ID NO: 33971 - DNA, 15 bp, Homo sapiens
aatttaacctttcct

SEQ ID NO: 33972 - DNA, 15 bp, Homo sapiens
atttaacctttcctt

SEQ ID NO: 33973 - DNA, 15 bp, Homo sapiens
tttaacctttccttg

SEQ ID NO: 33974 - DNA, 15 bp, Homo sapiens
ttaacctttccttgt

SEQ ID NO: 33975 - DNA, 15 bp, Homo sapiens
taacctttccttgtg

SEQ ID NO: 33976 - DNA, 15 bp, Homo sapiens
aacctttccttgtgc

SEQ ID NO: 33977 - DNA, 15 bp, Homo sapiens
acctttccttgtgcg

SEQ ID NO: 33978 - DNA, 15 bp, Homo sapiens
cctttccttgtgcgg

SEQ ID NO: 33979 - DNA, 15 bp, Homo sapiens
ctttccttgtgcggc

SEQ ID NO: 33980 - DNA, 15 bp, Homo sapiens
tttccttgtgcggct

SEQ ID NO: 33981 - DNA, 15 bp, Homo sapiens
ttccttgtgcggctt

SEQ ID NO: 33982 - DNA, 15 bp, Homo sapiens
tccttgtgcggcttt

SEQ ID NO: 33983 - DNA, 15 bp, Homo sapiens
ccttgtgcggctttc

SEQ ID NO: 33984 - DNA, 15 bp, Homo sapiens
cttgtgcggctttca

SEQ ID NO: 33985 - DNA, 15 bp, Homo sapiens
ttgtgcggctttcag

SEQ ID NO: 33986 - DNA, 15 bp, Homo sapiens
tgtgcggctttcagc

SEQ ID NO: 33987 - DNA, 15 bp, Homo sapiens
gtgcggctttcagca

SEQ ID NO: 33988 - DNA, 15 bp, Homo sapiens
tgcggctttcagcag

SEQ ID NO: 33989 - DNA, 15 bp, Homo sapiens
gcggctttcagcagt

SEQ ID NO: 33990 - DNA, 15 bp, Homo sapiens
cggctttcagcagtt

SEQ ID NO: 33991 - DNA, 15 bp, Homo sapiens
ggctttcagcagttc

SEQ ID NO: 33992 - DNA, 15 bp, Homo sapiens
gctttcagcagttct

SEQ ID NO: 33993 - DNA, 15 bp, Homo sapiens
ctttcagcagttcta

SEQ ID NO: 33994 - DNA, 15 bp, Homo sapiens
tttcagcagttctac

SEQ ID NO: 33995 - DNA, 15 bp, Homo sapiens
ttcagcagttctaca

SEQ ID NO: 33996 - DNA, 15 bp, Homo sapiens
tcagcagttctacag

SEQ ID NO: 33997 - DNA, 15 bp, Homo sapiens
cagcagttctacagc

SEQ ID NO: 33998 - DNA, 15 bp, Homo sapiens
agcagttctacagct

SEQ ID NO: 33999 - DNA, 15 bp, Homo sapiens
gcagttctacagctt

SEQ ID NO: 34000 - DNA, 15 bp, Homo sapiens
cagttctacagcttt

SEQ ID NO: 34001 - DNA, 15 bp, Homo sapiens
agttctacagctttt

SEQ ID NO: 34002 - DNA, 15 bp, Homo sapiens
gttctacagcttttt

SEQ ID NO: 34003 - DNA, 15 bp, Homo sapiens
ttctacagctttttc

SEQ ID NO: 34004 - DNA, 15 bp, Homo sapiens
tctacagctttttca

SEQ ID NO: 34005 - DNA, 15 bp, Homo sapiens
ctacagctttttcat

SEQ ID NO: 34006 - DNA, 15 bp, Homo sapiens
tacagctttttcatg

SEQ ID NO: 34007 - DNA, 15 bp, Homo sapiens
acagctttttcatga

SEQ ID NO: 34008 - DNA, 15 bp, Homo sapiens
cagctttttcatgat

SEQ ID NO: 34009 - DNA, 15 bp, Homo sapiens
agctttttcatgatg

SEQ ID NO: 34010 - DNA, 15 bp, Homo sapiens
gctttttcatgatgt

SEQ ID NO: 34011 - DNA, 15 bp, Homo sapiens
ctttttcatgatgtt

SEQ ID NO: 34012 - DNA, 15 bp, Homo sapiens
tttttcatgatgttc

SEQ ID NO: 34013 - DNA, 15 bp, Homo sapiens
ttttcatgatgttct

SEQ ID NO: 34014 - DNA, 15 bp, Homo sapiens
tttcatgatgttctc

SEQ ID NO: 34015 - DNA, 15 bp, Homo sapiens
ttcatgatgttctcc

SEQ ID NO: 34016 - DNA, 15 bp, Homo sapiens
tcatgatgttctcct

SEQ ID NO: 34017 - DNA, 15 bp, Homo sapiens
catgatgttctcctt

SEQ ID NO: 34018 - DNA, 15 bp, Homo sapiens
atgatgttctccttc

SEQ ID NO: 34019 - DNA, 15 bp, Homo sapiens
tgatgttctccttca

SEQ ID NO: 34020 - DNA, 15 bp, Homo sapiens
gatgttctccttcaa

SEQ ID NO: 34021 - DNA, 15 bp, Homo sapiens
atgttctccttcaac

SEQ ID NO: 34022 - DNA, 15 bp, Homo sapiens
tgttctccttcaaca

SEQ ID NO: 34023 - DNA, 15 bp, Homo sapiens
gttctccttcaacac

SEQ ID NO: 34024 - DNA, 15 bp, Homo sapiens
ttctccttcaacact

SEQ ID NO: 34025 - DNA, 15 bp, Homo sapiens
tctccttcaacactc

SEQ ID NO: 34026 - DNA, 15 bp, Homo sapiens
ctccttcaacactct

SEQ ID NO: 34027 - DNA, 15 bp, Homo sapiens
tccttcaacactcta

SEQ ID NO: 34028 - DNA, 15 bp, Homo sapiens
ccttcaacactctag

SEQ ID NO: 34029 - DNA, 15 bp, Homo sapiens
cttcaacactctagg

SEQ ID NO: 34030 - DNA, 15 bp, Homo sapiens
ttcaacactctaggg

SEQ ID NO: 34031 - DNA, 15 bp, Homo sapiens
tcaacactctagggg

SEQ ID NO: 34032 - DNA, 15 bp, Homo sapiens
caacactctagggga

SEQ ID NO: 34033 - DNA, 15 bp, Homo sapiens
aacactctaggggaa

SEQ ID NO: 34034 - DNA, 15 bp, Homo sapiens
acactctaggggaaa

SEQ ID NO: 34035 - DNA, 15 bp, Homo sapiens
cactctaggggaaaa

SEQ ID NO: 34036 - DNA, 15 bp, Homo sapiens
actctaggggaaaaa

SEQ ID NO: 34037 - DNA, 15 bp, Homo sapiens
ctctaggggaaaaaa

SEQ ID NO: 34038 - DNA, 15 bp, Homo sapiens
tctaggggaaaaaaa

SEQ ID NO: 34039 - DNA, 15 bp, Homo sapiens
ctaggggaaaaaaaa

SEQ ID NO: 34040 - DNA, 15 bp, Homo sapiens
taggggaaaaaaaaa

SEQ ID NO: 34041 - DNA, 15 bp, Homo sapiens
aggggaaaaaaaaac

SEQ ID NO: 34042 - DNA, 15 bp, Homo sapiens
ggggaaaaaaaaaca

SEQ ID NO: 34043 - DNA, 15 bp, Homo sapiens
gggaaaaaaaaacaa

SEQ ID NO: 34044 - DNA, 15 bp, Homo sapiens
ggaaaaaaaaacaac

SEQ ID NO: 34045 - DNA, 15 bp, Homo sapiens
gaaaaaaaaacaacc

SEQ ID NO: 34046 - DNA, 15 bp, Homo sapiens
aaaaaaaaacaacca

SEQ ID NO: 34047 - DNA, 15 bp, Homo sapiens
aaaaaaaacaaccaa

SEQ ID NO: 34048 - DNA, 15 bp, Homo sapiens
aaaaaaacaaccaac

SEQ ID NO: 34049 - DNA, 15 bp, Homo sapiens
aaaaaacaaccaacc

SEQ ID NO: 34050 - DNA, 15 bp, Homo sapiens
aaaaacaaccaacca

SEQ ID NO: 34051 - DNA, 15 bp, Homo sapiens
aaaacaaccaaccat

SEQ ID NO: 34052 - DNA, 15 bp, Homo sapiens
aaacaaccaaccata

SEQ ID NO: 34053 - DNA, 15 bp, Homo sapiens
aacaaccaaccatac

SEQ ID NO: 34054 - DNA, 15 bp, Homo sapiens
acaaccaaccataca

SEQ ID NO: 34055 - DNA, 15 bp, Homo sapiens
caaccaaccatacac

SEQ ID NO: 34056 - DNA, 15 bp, Homo sapiens
aaccaaccatacact

SEQ ID NO: 34057 - DNA, 15 bp, Homo sapiens
accaaccatacacta

SEQ ID NO: 34058 - DNA, 15 bp, Homo sapiens
ccaaccatacactaa

SEQ ID NO: 34059 - DNA, 15 bp, Homo sapiens
caaccatacactaat

SEQ ID NO: 34060 - DNA, 15 bp, Homo sapiens
aaccatacactaata

SEQ ID NO: 34061 - DNA, 15 bp, Homo sapiens
accatacactaatat

SEQ ID NO: 34062 - DNA, 15 bp, Homo sapiens
ccatacactaatatc

SEQ ID NO: 34063 - DNA, 15 bp, Homo sapiens
catacactaatatct

SEQ ID NO: 34064 - DNA, 15 bp, Homo sapiens
atacactaatatcta

SEQ ID NO: 34065 - DNA, 15 bp, Homo sapiens
tacactaatatctaa

SEQ ID NO: 34066 - DNA, 15 bp, Homo sapiens
acactaatatctaag

SEQ ID NO: 34067 - DNA, 15 bp, Homo sapiens
cactaatatctaagt

SEQ ID NO: 34068 - DNA, 15 bp, Homo sapiens
actaatatctaagtt

SEQ ID NO: 34069 - DNA, 15 bp, Homo sapiens
ctaatatctaagttt

SEQ ID NO: 34070 - DNA, 15 bp, Homo sapiens
taatatctaagtttt

SEQ ID NO: 34071 - DNA, 15 bp, Homo sapiens
aatatctaagttttg

SEQ ID NO: 34072 - DNA, 15 bp, Homo sapiens
atatctaagttttga

SEQ ID NO: 34073 - DNA, 15 bp, Homo sapiens
tatctaagttttgaa

SEQ ID NO: 34074 - DNA, 15 bp, Homo sapiens
atctaagttttgaaa

SEQ ID NO: 34075 - DNA, 15 bp, Homo sapiens
tctaagttttgaaag

SEQ ID NO: 34076 - DNA, 15 bp, Homo sapiens
ctaagttttgaaagt

SEQ ID NO: 34077 - DNA, 15 bp, Homo sapiens
taagttttgaaagta

SEQ ID NO: 34078 - DNA, 15 bp, Homo sapiens
aagttttgaaagtaa

SEQ ID NO: 34079 - DNA, 15 bp, Homo sapiens
agttttgaaagtaac

SEQ ID NO: 34080 - DNA, 15 bp, Homo sapiens
gttttgaaagtaact

SEQ ID NO: 34081 - DNA, 15 bp, Homo sapiens
ttttgaaagtaactc

SEQ ID NO: 34082 - DNA, 15 bp, Homo sapiens
tttgaaagtaactca

SEQ ID NO: 34083 - DNA, 15 bp, Homo sapiens
ttgaaagtaactcaa

SEQ ID NO: 34084 - DNA, 15 bp, Homo sapiens
tgaaagtaactcaaa

SEQ ID NO: 34085 - DNA, 15 bp, Homo sapiens
gaaagtaactcaaaa

SEQ ID NO: 34086 - DNA, 15 bp, Homo sapiens
aaagtaactcaaaat

SEQ ID NO: 34087 - DNA, 15 bp, Homo sapiens
aagtaactcaaaatg

SEQ ID NO: 34088 - DNA, 15 bp, Homo sapiens
agtaactcaaaatgc

SEQ ID NO: 34089 - DNA, 15 bp, Homo sapiens
gtaactcaaaatgca

SEQ ID NO: 34090 - DNA, 15 bp, Homo sapiens
taactcaaaatgcaa

SEQ ID NO: 34091 - DNA, 15 bp, Homo sapiens
aactcaaaatgcaaa

SEQ ID NO: 34092 - DNA, 15 bp, Homo sapiens
actcaaaatgcaaaa

SEQ ID NO: 34093 - DNA, 15 bp, Homo sapiens
ctcaaaatgcaaaaa

SEQ ID NO: 34094 - DNA, 15 bp, Homo sapiens
tcaaaatgcaaaaat

SEQ ID NO: 34095 - DNA, 15 bp, Homo sapiens
caaaatgcaaaaatg

SEQ ID NO: 34096 - DNA, 15 bp, Homo sapiens
aaaatgcaaaaatgt

SEQ ID NO: 34097 - DNA, 15 bp, Homo sapiens
aaatgcaaaaatgtt

SEQ ID NO: 34098 - DNA, 15 bp, Homo sapiens
aatgcaaaaatgttt

SEQ ID NO: 34099 - DNA, 15 bp, Homo sapiens
atgcaaaaatgttta

SEQ ID NO: 34100 - DNA, 15 bp, Homo sapiens
tgcaaaaatgtttac

SEQ ID NO: 34101 - DNA, 15 bp, Homo sapiens
gcaaaaatgtttaca

SEQ ID NO: 34102 - DNA, 15 bp, Homo sapiens
caaaaatgtttacaa

SEQ ID NO: 34103 - DNA, 15 bp, Homo sapiens
aaaaatgtttacaat

SEQ ID NO: 34104 - DNA, 15 bp, Homo sapiens
aaaatgtttacaata

SEQ ID NO: 34105 - DNA, 15 bp, Homo sapiens
aaatgtttacaatat

SEQ ID NO: 34106 - DNA, 15 bp, Homo sapiens
aatgtttacaatata

SEQ ID NO: 34107 - DNA, 15 bp, Homo sapiens
atgtttacaatatat

SEQ ID NO: 34108 - DNA, 15 bp, Homo sapiens
tgtttacaatatata

SEQ ID NO: 34109 - DNA, 15 bp, Homo sapiens
gtttacaatatatat

SEQ ID NO: 34110 - DNA, 15 bp, Homo sapiens
tttacaatatatata

SEQ ID NO: 34111 - DNA, 15 bp, Homo sapiens
ttacaatatatataa

SEQ ID NO: 34112 - DNA, 15 bp, Homo sapiens
tacaatatatataat

SEQ ID NO: 34113 - DNA, 15 bp, Homo sapiens
acaatatatataatg

SEQ ID NO: 34114 - DNA, 15 bp, Homo sapiens
caatatatataatga

SEQ ID NO: 34115 - DNA, 15 bp, Homo sapiens
aatatatataatgaa

SEQ ID NO: 34116 - DNA, 15 bp, Homo sapiens
atatatataatgaag

SEQ ID NO: 34117 - DNA, 15 bp, Homo sapiens
tatatataatgaaga

SEQ ID NO: 34118 - DNA, 15 bp, Homo sapiens
atatataatgaagaa

SEQ ID NO: 34119 - DNA, 15 bp, Homo sapiens
tatataatgaagaaa

SEQ ID NO: 34120 - DNA, 15 bp, Homo sapiens
atataatgaagaaaa

SEQ ID NO: 34121 - DNA, 15 bp, Homo sapiens
tataatgaagaaaag

SEQ ID NO: 34122 - DNA, 15 bp, Homo sapiens
ataatgaagaaaagt

SEQ ID NO: 34123 - DNA, 15 bp, Homo sapiens
taatgaagaaaagtt

SEQ ID NO: 34124 - DNA, 15 bp, Homo sapiens
aatgaagaaaagttt

SEQ ID NO: 34125 - DNA, 15 bp, Homo sapiens
atgaagaaaagtttt

SEQ ID NO: 34126 - DNA, 15 bp, Homo sapiens
tgaagaaaagtttta

SEQ ID NO: 34127 - DNA, 15 bp, Homo sapiens
gaagaaaagttttaa

SEQ ID NO: 34128 - DNA, 15 bp, Homo sapiens
aagaaaagttttaat

SEQ ID NO: 34129 - DNA, 15 bp, Homo sapiens
agaaaagttttaatg

SEQ ID NO: 34130 - DNA, 15 bp, Homo sapiens
gaaaagttttaatgt

SEQ ID NO: 34131 - DNA, 15 bp, Homo sapiens
aaaagttttaatgtt

SEQ ID NO: 34132 - DNA, 15 bp, Homo sapiens
aaagttttaatgtta

SEQ ID NO: 34133 - DNA, 15 bp, Homo sapiens
aagttttaatgttat

SEQ ID NO: 34134 - DNA, 15 bp, Homo sapiens
agttttaatgttata

SEQ ID NO: 34135 - DNA, 15 bp, Homo sapiens
gttttaatgttatat

SEQ ID NO: 34136 - DNA, 15 bp, Homo sapiens
ttttaatgttatatt

SEQ ID NO: 34137 - DNA, 15 bp, Homo sapiens
tttaatgttatatta

SEQ ID NO: 34138 - DNA, 15 bp, Homo sapiens
ttaatgttatattat

SEQ ID NO: 34139 - DNA, 15 bp, Homo sapiens
taatgttatattatt

SEQ ID NO: 34140 - DNA, 15 bp, Homo sapiens
aatgttatattattc

SEQ ID NO: 34141 - DNA, 15 bp, Homo sapiens
atgttatattattcc

SEQ ID NO: 34142 - DNA, 15 bp, Homo sapiens
tgttatattattcca

SEQ ID NO: 34143 - DNA, 15 bp, Homo sapiens
gttatattattccaa

SEQ ID NO: 34144 - DNA, 15 bp, Homo sapiens
ttatattattccaac

SEQ ID NO: 34145 - DNA, 15 bp, Homo sapiens
tatattattccaaca

SEQ ID NO: 34146 - DNA, 15 bp, Homo sapiens
atattattccaacat

SEQ ID NO: 34147 - DNA, 15 bp, Homo sapiens
tattattccaacatt

SEQ ID NO: 34148 - DNA, 15 bp, Homo sapiens
attattccaacatta

SEQ ID NO: 34149 - DNA, 15 bp, Homo sapiens
ttattccaacattac

SEQ ID NO: 34150 - DNA, 15 bp, Homo sapiens
tattccaacattaca

SEQ ID NO: 34151 - DNA, 15 bp, Homo sapiens
attccaacattacaa

SEQ ID NO: 34152 - DNA, 15 bp, Homo sapiens
ttccaacattacaaa

SEQ ID NO: 34153 - DNA, 15 bp, Homo sapiens
tccaacattacaaaa

SEQ ID NO: 34154 - DNA, 15 bp, Homo sapiens
ccaacattacaaaac

SEQ ID NO: 34155 - DNA, 15 bp, Homo sapiens
caacattacaaaact

SEQ ID NO: 34156 - DNA, 15 bp, Homo sapiens
aacattacaaaacta

SEQ ID NO: 34157 - DNA, 15 bp, Homo sapiens
acattacaaaactaa

SEQ ID NO: 34158 - DNA, 15 bp, Homo sapiens
cattacaaaactaag

SEQ ID NO: 34159 - DNA, 15 bp, Homo sapiens
attacaaaactaaga

SEQ ID NO: 34160 - DNA, 15 bp, Homo sapiens
ttacaaaactaagaa

SEQ ID NO: 34161 - DNA, 15 bp, Homo sapiens
tacaaaactaagaaa

SEQ ID NO: 34162 - DNA, 15 bp, Homo sapiens
acaaaactaagaaat

SEQ ID NO: 34163 - DNA, 15 bp, Homo sapiens
caaaactaagaaata

SEQ ID NO: 34164 - DNA, 15 bp, Homo sapiens
aaaactaagaaataa

SEQ ID NO: 34165 - DNA, 15 bp, Homo sapiens
aaactaagaaataat

SEQ ID NO: 34166 - DNA, 15 bp, Homo sapiens
aactaagaaataatc

SEQ ID NO: 34167 - DNA, 15 bp, Homo sapiens
actaagaaataatcc

SEQ ID NO: 34168 - DNA, 15 bp, Homo sapiens
ctaagaaataatcct

SEQ ID NO: 34169 - DNA, 15 bp, Homo sapiens
taagaaataatcctg

SEQ ID NO: 34170 - DNA, 15 bp, Homo sapiens
aagaaataatcctgc

SEQ ID NO: 34171 - DNA, 15 bp, Homo sapiens
agaaataatcctgcc

SEQ ID NO: 34172 - DNA, 15 bp, Homo sapiens
gaaataatcctgcct

SEQ ID NO: 34173 - DNA, 15 bp, Homo sapiens
aaataatcctgcctt

SEQ ID NO: 34174 - DNA, 15 bp, Homo sapiens
aataatcctgcctta

SEQ ID NO: 34175 - DNA, 15 bp, Homo sapiens
ataatcctgccttac

SEQ ID NO: 34176 - DNA, 15 bp, Homo sapiens
taatcctgccttacc

SEQ ID NO: 34177 - DNA, 15 bp, Homo sapiens
aatcctgccttacca

SEQ ID NO: 34178 - DNA, 15 bp, Homo sapiens
atcctgccttaccat

SEQ ID NO: 34179 - DNA, 15 bp, Homo sapiens
tcctgccttaccatt

SEQ ID NO: 34180 - DNA, 15 bp, Homo sapiens
cctgccttaccattt

SEQ ID NO: 34181 - DNA, 15 bp, Homo sapiens
ctgccttaccatttt

SEQ ID NO: 34182 - DNA, 15 bp, Homo sapiens
tgccttaccatttta

SEQ ID NO: 34183 - DNA, 15 bp, Homo sapiens
gccttaccattttaa

SEQ ID NO: 34184 - DNA, 15 bp, Homo sapiens
ccttaccattttaat

SEQ ID NO: 34185 - DNA, 15 bp, Homo sapiens
cttaccattttaatc

SEQ ID NO: 34186 - DNA, 15 bp, Homo sapiens
ttaccattttaatct

SEQ ID NO: 34187 - DNA, 15 bp, Homo sapiens
taccattttaatcta

SEQ ID NO: 34188 - DNA, 15 bp, Homo sapiens
accattttaatctat

SEQ ID NO: 34189 - DNA, 15 bp, Homo sapiens
ccattttaatctata

SEQ ID NO: 34190 - DNA, 15 bp, Homo sapiens
cattttaatctatat

SEQ ID NO: 34191 - DNA, 15 bp, Homo sapiens
attttaatctatatg

SEQ ID NO: 34192 - DNA, 15 bp, Homo sapiens
ttttaatctatatga

SEQ ID NO: 34193 - DNA, 15 bp, Homo sapiens
tttaatctatatgaa

SEQ ID NO: 34194 - DNA, 15 bp, Homo sapiens
ttaatctatatgaaa

SEQ ID NO: 34195 - DNA, 15 bp, Homo sapiens
taatctatatgaaat

SEQ ID NO: 34196 - DNA, 15 bp, Homo sapiens
aatctatatgaaatc

SEQ ID NO: 34197 - DNA, 15 bp, Homo sapiens
atctatatgaaatcc

SEQ ID NO: 34198 - DNA, 15 bp, Homo sapiens
tctatatgaaatcct

SEQ ID NO: 34199 - DNA, 15 bp, Homo sapiens
ctatatgaaatcctc

SEQ ID NO: 34200 - DNA, 15 bp, Homo sapiens
tatatgaaatcctct

SEQ ID NO: 34201 - DNA, 15 bp, Homo sapiens
atatgaaatcctctc

SEQ ID NO: 34202 - DNA, 15 bp, Homo sapiens
tatgaaatcctctct

SEQ ID NO: 34203 - DNA, 15 bp, Homo sapiens
atgaaatcctctctt

SEQ ID NO: 34204 - DNA, 15 bp, Homo sapiens
tgaaatcctctctta

SEQ ID NO: 34205 - DNA, 15 bp, Homo sapiens
gaaatcctctcttac

SEQ ID NO: 34206 - DNA, 15 bp, Homo sapiens
aaatcctctcttaca

SEQ ID NO: 34207 - DNA, 15 bp, Homo sapiens
aatcctctcttacat

SEQ ID NO: 34208 - DNA, 15 bp, Homo sapiens
atcctctcttacatc

SEQ ID NO: 34209 - DNA, 15 bp, Homo sapiens
tcctctcttacatca

SEQ ID NO: 34210 - DNA, 15 bp, Homo sapiens
cctctcttacatcat

SEQ ID NO: 34211 - DNA, 15 bp, Homo sapiens
ctctcttacatcata

SEQ ID NO: 34212 - DNA, 15 bp, Homo sapiens
tctcttacatcatat

SEQ ID NO: 34213 - DNA, 15 bp, Homo sapiens
ctcttacatcatatt

SEQ ID NO: 34214 - DNA, 15 bp, Homo sapiens
tcttacatcatattc

SEQ ID NO: 34215 - DNA, 15 bp, Homo sapiens
cttacatcatattct

SEQ ID NO: 34216 - DNA, 15 bp, Homo sapiens
ttacatcatattctg

SEQ ID NO: 34217 - DNA, 15 bp, Homo sapiens
tacatcatattctgt

SEQ ID NO: 34218 - DNA, 15 bp, Homo sapiens
acatcatattctgtt

SEQ ID NO: 34219 - DNA, 15 bp, Homo sapiens
catcatattctgttt

SEQ ID NO: 34220 - DNA, 15 bp, Homo sapiens
atcatattctgttta

SEQ ID NO: 34221 - DNA, 15 bp, Homo sapiens
tcatattctgtttat

SEQ ID NO: 34222 - DNA, 15 bp, Homo sapiens
catattctgtttata

SEQ ID NO: 34223 - DNA, 15 bp, Homo sapiens
atattctgtttatag

SEQ ID NO: 34224 - DNA, 15 bp, Homo sapiens
tattctgtttatagt

SEQ ID NO: 34225 - DNA, 15 bp, Homo sapiens
attctgtttatagtc

SEQ ID NO: 34226 - DNA, 15 bp, Homo sapiens
ttctgtttatagtct

SEQ ID NO: 34227 - DNA, 15 bp, Homo sapiens
tctgtttatagtcta

SEQ ID NO: 34228 - DNA, 15 bp, Homo sapiens
ctgtttatagtctaa

SEQ ID NO: 34229 - DNA, 15 bp, Homo sapiens
tgtttatagtctaaa

SEQ ID NO: 34230 - DNA, 15 bp, Homo sapiens
gtttatagtctaaaa

SEQ ID NO: 34231 - DNA, 15 bp, Homo sapiens
tttatagtctaaaag

SEQ ID NO: 34232 - DNA, 15 bp, Homo sapiens
ttatagtctaaaagc

SEQ ID NO: 34233 - DNA, 15 bp, Homo sapiens
tatagtctaaaagct

SEQ ID NO: 34234 - DNA, 15 bp, Homo sapiens
atagtctaaaagctg

SEQ ID NO: 34235 - DNA, 15 bp, Homo sapiens
tagtctaaaagctgg

SEQ ID NO: 34236 - DNA, 15 bp, Homo sapiens
agtctaaaagctggc

SEQ ID NO: 34237 - DNA, 15 bp, Homo sapiens
gtctaaaagctggct

SEQ ID NO: 34238 - DNA, 15 bp, Homo sapiens
tctaaaagctggctt

SEQ ID NO: 34239 - DNA, 15 bp, Homo sapiens
ctaaaagctggcttt

SEQ ID NO: 34240 - DNA, 15 bp, Homo sapiens
taaaagctggctttt

SEQ ID NO: 34241 - DNA, 15 bp, Homo sapiens
aaaagctggctttta

SEQ ID NO: 34242 - DNA, 15 bp, Homo sapiens
aaagctggcttttaa

SEQ ID NO: 34243 - DNA, 15 bp, Homo sapiens
aagctggcttttaag

SEQ ID NO: 34244 - DNA, 15 bp, Homo sapiens
agctggcttttaagt

SEQ ID NO: 34245 - DNA, 15 bp, Homo sapiens
gctggcttttaagtt

SEQ ID NO: 34246 - DNA, 15 bp, Homo sapiens
ctggcttttaagttc

SEQ ID NO: 34247 - DNA, 15 bp, Homo sapiens
tggcttttaagttcc

SEQ ID NO: 34248 - DNA, 15 bp, Homo sapiens
ggcttttaagttcca

SEQ ID NO: 34249 - DNA, 15 bp, Homo sapiens
gcttttaagttccaa

SEQ ID NO: 34250 - DNA, 15 bp, Homo sapiens
cttttaagttccaaa

SEQ ID NO: 34251 - DNA, 15 bp, Homo sapiens
ttttaagttccaaat

SEQ ID NO: 34252 - DNA, 15 bp, Homo sapiens
tttaagttccaaata

SEQ ID NO: 34253 - DNA, 15 bp, Homo sapiens
ttaagttccaaataa

SEQ ID NO: 34254 - DNA, 15 bp, Homo sapiens
taagttccaaataat

SEQ ID NO: 34255 - DNA, 15 bp, Homo sapiens
aagttccaaataatt

SEQ ID NO: 34256 - DNA, 15 bp, Homo sapiens
agttccaaataatta

SEQ ID NO: 34257 - DNA, 15 bp, Homo sapiens
gttccaaataattag

SEQ ID NO: 34258 - DNA, 15 bp, Homo sapiens
ttccaaataattagc

SEQ ID NO: 34259 - DNA, 15 bp, Homo sapiens
tccaaataattagca

SEQ ID NO: 34260 - DNA, 15 bp, Homo sapiens
ccaaataattagcat

SEQ ID NO: 34261 - DNA, 15 bp, Homo sapiens
caaataattagcata

SEQ ID NO: 34262 - DNA, 15 bp, Homo sapiens
aaataattagcatat

SEQ ID NO: 34263 - DNA, 15 bp, Homo sapiens
aataattagcatatt

SEQ ID NO: 34264 - DNA, 15 bp, Homo sapiens
ataattagcatatta

SEQ ID NO: 34265 - DNA, 15 bp, Homo sapiens
taattagcatattaa

SEQ ID NO: 34266 - DNA, 15 bp, Homo sapiens
aattagcatattaat

SEQ ID NO: 34267 - DNA, 15 bp, Homo sapiens
attagcatattaatc

SEQ ID NO: 34268 - DNA, 15 bp, Homo sapiens
ttagcatattaatct

SEQ ID NO: 34269 - DNA, 15 bp, Homo sapiens
tagcatattaatcta

SEQ ID NO: 34270 - DNA, 15 bp, Homo sapiens
agcatattaatctat

SEQ ID NO: 34271 - DNA, 15 bp, Homo sapiens
gcatattaatctata

SEQ ID NO: 34272 - DNA, 15 bp, Homo sapiens
catattaatctatat

SEQ ID NO: 34273 - DNA, 15 bp, Homo sapiens
atattaatctatatg

SEQ ID NO: 34274 - DNA, 15 bp, Homo sapiens
tattaatctatatgc

SEQ ID NO: 34275 - DNA, 15 bp, Homo sapiens
attaatctatatgcc

SEQ ID NO: 34276 - DNA, 15 bp, Homo sapiens
ttaatctatatgcct

SEQ ID NO: 34277 - DNA, 15 bp, Homo sapiens
taatctatatgcctt

SEQ ID NO: 34278 - DNA, 15 bp, Homo sapiens
aatctatatgcctta

SEQ ID NO: 34279 - DNA, 15 bp, Homo sapiens
atctatatgccttat

SEQ ID NO: 34280 - DNA, 15 bp, Homo sapiens
tctatatgccttatt

SEQ ID NO: 34281 - DNA, 15 bp, Homo sapiens
ctatatgccttatta

SEQ ID NO: 34282 - DNA, 15 bp, Homo sapiens
tatatgccttattat

SEQ ID NO: 34283 - DNA, 15 bp, Homo sapiens
atatgccttattatt

SEQ ID NO: 34284 - DNA, 15 bp, Homo sapiens
tatgccttattattt

SEQ ID NO: 34285 - DNA, 15 bp, Homo sapiens
atgccttattatttc

SEQ ID NO: 34286 - DNA, 15 bp, Homo sapiens
tgccttattatttca

SEQ ID NO: 34287 - DNA, 15 bp, Homo sapiens
gccttattatttcag

SEQ ID NO: 34288 - DNA, 15 bp, Homo sapiens
ccttattatttcagt

SEQ ID NO: 34289 - DNA, 15 bp, Homo sapiens
cttattatttcagta

SEQ ID NO: 34290 - DNA, 15 bp, Homo sapiens
ttattatttcagtag

SEQ ID NO: 34291 - DNA, 15 bp, Homo sapiens
tattatttcagtaga

SEQ ID NO: 34292 - DNA, 15 bp, Homo sapiens
attatttcagtagat

SEQ ID NO: 34293 - DNA, 15 bp, Homo sapiens
ttatttcagtagatc

SEQ ID NO: 34294 - DNA, 15 bp, Homo sapiens
tatttcagtagatca

SEQ ID NO: 34295 - DNA, 15 bp, Homo sapiens
atttcagtagatcaa

SEQ ID NO: 34296 - DNA, 15 bp, Homo sapiens
tttcagtagatcaag

SEQ ID NO: 34297 - DNA, 15 bp, Homo sapiens
ttcagtagatcaagc

SEQ ID NO: 34298 - DNA, 15 bp, Homo sapiens
tcagtagatcaagca

SEQ ID NO: 34299 - DNA, 15 bp, Homo sapiens
cagtagatcaagcaa

SEQ ID NO: 34300 - DNA, 15 bp, Homo sapiens
agtagatcaagcaat

SEQ ID NO: 34301 - DNA, 15 bp, Homo sapiens
gtagatcaagcaatt

SEQ ID NO: 34302 - DNA, 15 bp, Homo sapiens
tagatcaagcaattg

SEQ ID NO: 34303 - DNA, 15 bp, Homo sapiens
agatcaagcaattgg

SEQ ID NO: 34304 - DNA, 15 bp, Homo sapiens
gatcaagcaattggc

SEQ ID NO: 34305 - DNA, 15 bp, Homo sapiens
atcaagcaattggca

SEQ ID NO: 34306 - DNA, 15 bp, Homo sapiens
tcaagcaattggcat

SEQ ID NO: 34307 - DNA, 15 bp, Homo sapiens
caagcaattggcatt

SEQ ID NO: 34308 - DNA, 15 bp, Homo sapiens
aagcaattggcattt

SEQ ID NO: 34309 - DNA, 15 bp, Homo sapiens
agcaattggcatttt

SEQ ID NO: 34310 - DNA, 15 bp, Homo sapiens
gcaattggcatttta

SEQ ID NO: 34311 - DNA, 15 bp, Homo sapiens
caattggcattttat

SEQ ID NO: 34312 - DNA, 15 bp, Homo sapiens
aattggcattttata

SEQ ID NO: 34313 - DNA, 15 bp, Homo sapiens
attggcattttataa

SEQ ID NO: 34314 - DNA, 15 bp, Homo sapiens
ttggcattttataag

SEQ ID NO: 34315 - DNA, 15 bp, Homo sapiens
tggcattttataaga

SEQ ID NO: 34316 - DNA, 15 bp, Homo sapiens
ggcattttataagag

SEQ ID NO: 34317 - DNA, 15 bp, Homo sapiens
gcattttataagagt

SEQ ID NO: 34318 - DNA, 15 bp, Homo sapiens
cattttataagagta

SEQ ID NO: 34319 - DNA, 15 bp, Homo sapiens
attttataagagtaa

SEQ ID NO: 34320 - DNA, 15 bp, Homo sapiens
ttttataagagtaaa

SEQ ID NO: 34321 - DNA, 15 bp, Homo sapiens
tttataagagtaaaa

SEQ ID NO: 34322 - DNA, 15 bp, Homo sapiens
ttataagagtaaaat

SEQ ID NO: 34323 - DNA, 15 bp, Homo sapiens
tataagagtaaaatg

SEQ ID NO: 34324 - DNA, 15 bp, Homo sapiens
ataagagtaaaatga

SEQ ID NO: 34325 - DNA, 15 bp, Homo sapiens
taagagtaaaatgag

SEQ ID NO: 34326 - DNA, 15 bp, Homo sapiens
aagagtaaaatgagg

SEQ ID NO: 34327 - DNA, 15 bp, Homo sapiens
agagtaaaatgaggg

SEQ ID NO: 34328 - DNA, 15 bp, Homo sapiens
gagtaaaatgagggt

SEQ ID NO: 34329 - DNA, 15 bp, Homo sapiens
agtaaaatgagggta

SEQ ID NO: 34330 - DNA, 15 bp, Homo sapiens
gtaaaatgagggtag

SEQ ID NO: 34331 - DNA, 15 bp, Homo sapiens
taaaatgagggtaga

SEQ ID NO: 34332 - DNA, 15 bp, Homo sapiens
aaaatgagggtagac

SEQ ID NO: 34333 - DNA, 15 bp, Homo sapiens
aaatgagggtagact

SEQ ID NO: 34334 - DNA, 15 bp, Homo sapiens
aatgagggtagactt

SEQ ID NO: 34335 - DNA, 15 bp, Homo sapiens
atgagggtagacttc

SEQ ID NO: 34336 - DNA, 15 bp, Homo sapiens
tgagggtagacttct

SEQ ID NO: 34337 - DNA, 15 bp, Homo sapiens
gagggtagacttcta

SEQ ID NO: 34338 - DNA, 15 bp, Homo sapiens
agggtagacttctaa

SEQ ID NO: 34339 - DNA, 15 bp, Homo sapiens
gggtagacttctaat

SEQ ID NO: 34340 - DNA, 15 bp, Homo sapiens
ggtagacttctaatt

SEQ ID NO: 34341 - DNA, 15 bp, Homo sapiens
gtagacttctaattt

SEQ ID NO: 34342 - DNA, 15 bp, Homo sapiens
tagacttctaattta

SEQ ID NO: 34343 - DNA, 15 bp, Homo sapiens
agacttctaatttaa

SEQ ID NO: 34344 - DNA, 15 bp, Homo sapiens
gacttctaatttaat

SEQ ID NO: 34345 - DNA, 15 bp, Homo sapiens
acttctaatttaatg

SEQ ID NO: 34346 - DNA, 15 bp, Homo sapiens
cttctaatttaatgt

SEQ ID NO: 34347 - DNA, 15 bp, Homo sapiens
ttctaatttaatgta

SEQ ID NO: 34348 - DNA, 15 bp, Homo sapiens
tctaatttaatgtat

SEQ ID NO: 34349 - DNA, 15 bp, Homo sapiens
ctaatttaatgtatt

SEQ ID NO: 34350 - DNA, 15 bp, Homo sapiens
taatttaatgtattg

SEQ ID NO: 34351 - DNA, 15 bp, Homo sapiens
aatttaatgtattgc

SEQ ID NO: 34352 - DNA, 15 bp, Homo sapiens
atttaatgtattgcc

SEQ ID NO: 34353 - DNA, 15 bp, Homo sapiens
tttaatgtattgcct

SEQ ID NO: 34354 - DNA, 15 bp, Homo sapiens
ttaatgtattgcctt

SEQ ID NO: 34355 - DNA, 15 bp, Homo sapiens
taatgtattgccttt

SEQ ID NO: 34356 - DNA, 15 bp, Homo sapiens
aatgtattgccttta

SEQ ID NO: 34357 - DNA, 15 bp, Homo sapiens
atgtattgcctttaa

SEQ ID NO: 34358 - DNA, 15 bp, Homo sapiens
tgtattgcctttaat

SEQ ID NO: 34359 - DNA, 15 bp, Homo sapiens
gtattgcctttaata

SEQ ID NO: 34360 - DNA, 15 bp, Homo sapiens
tattgcctttaataa

SEQ ID NO: 34361 - DNA, 15 bp, Homo sapiens
attgcctttaataaa

SEQ ID NO: 34362 - DNA, 15 bp, Homo sapiens
ttgcctttaataaag

SEQ ID NO: 34363 - DNA, 15 bp, Homo sapiens
tgcctttaataaaga

SEQ ID NO: 34364 - DNA, 15 bp, Homo sapiens
gcctttaataaagag

SEQ ID NO: 34365 - DNA, 15 bp, Homo sapiens
cctttaataaagagc

SEQ ID NO: 34366 - DNA, 15 bp, Homo sapiens
ctttaataaagagct

SEQ ID NO: 34367 - DNA, 15 bp, Homo sapiens
tttaataaagagctt

SEQ ID NO: 34368 - DNA, 15 bp, Homo sapiens
ttaataaagagctta

SEQ ID NO: 34369 - DNA, 15 bp, Homo sapiens
taataaagagcttat

SEQ ID NO: 34370 - DNA, 15 bp, Homo sapiens
aataaagagcttatg

SEQ ID NO: 34371 - DNA, 15 bp, Homo sapiens
ataaagagcttatgt

SEQ ID NO: 34372 - DNA, 15 bp, Homo sapiens
taaagagcttatgtc

SEQ ID NO: 34373 - DNA, 15 bp, Homo sapiens
aaagagcttatgtca

SEQ ID NO: 34374 - DNA, 15 bp, Homo sapiens
aagagcttatgtcat

SEQ ID NO: 34375 - DNA, 15 bp, Homo sapiens
agagcttatgtcata

SEQ ID NO: 34376 - DNA, 15 bp, Homo sapiens
gagcttatgtcataa

SEQ ID NO: 34377 - DNA, 15 bp, Homo sapiens
agcttatgtcataaa

SEQ ID NO: 34378 - DNA, 15 bp, Homo sapiens
gcttatgtcataaaa

SEQ ID NO: 34379 - DNA, 15 bp, Homo sapiens
cttatgtcataaaaa

SEQ ID NO: 34380 - DNA, 15 bp, Homo sapiens
ttatgtcataaaaat

SEQ ID NO: 34381 - DNA, 15 bp, Homo sapiens
tatgtcataaaaatg

SEQ ID NO: 34382 - DNA, 15 bp, Homo sapiens
atgtcataaaaatga

SEQ ID NO: 34383 - DNA, 15 bp, Homo sapiens
tgtcataaaaatgac

SEQ ID NO: 34384 - DNA, 15 bp, Homo sapiens
gtcataaaaatgaca

SEQ ID NO: 34385 - DNA, 15 bp, Homo sapiens
tcataaaaatgacat

SEQ ID NO: 34386 - DNA, 15 bp, Homo sapiens
cataaaaatgacatt

SEQ ID NO: 34387 - DNA, 15 bp, Homo sapiens
ataaaaatgacatta

SEQ ID NO: 34388 - DNA, 15 bp, Homo sapiens
taaaaatgacattaa

SEQ ID NO: 34389 - DNA, 15 bp, Homo sapiens
aaaaatgacattaag

SEQ ID NO: 34390 - DNA, 15 bp, Homo sapiens
aaaatgacattaagc

SEQ ID NO: 34391 - DNA, 15 bp, Homo sapiens
aaatgacattaagca

SEQ ID NO: 34392 - DNA, 15 bp, Homo sapiens
aatgacattaagcac

SEQ ID NO: 34393 - DNA, 15 bp, Homo sapiens
atgacattaagcact

SEQ ID NO: 34394 - DNA, 15 bp, Homo sapiens
tgacattaagcactg

SEQ ID NO: 34395 - DNA, 15 bp, Homo sapiens
gacattaagcactgc

SEQ ID NO: 34396 - DNA, 15 bp, Homo sapiens
acattaagcactgct

SEQ ID NO: 34397 - DNA, 15 bp, Homo sapiens
cattaagcactgcta

SEQ ID NO: 34398 - DNA, 15 bp, Homo sapiens
attaagcactgctaa

SEQ ID NO: 34399 - DNA, 15 bp, Homo sapiens
ttaagcactgctaat

SEQ ID NO: 34400 - DNA, 15 bp, Homo sapiens
taagcactgctaatt

SEQ ID NO: 34401 - DNA, 15 bp, Homo sapiens
aagcactgctaattt

SEQ ID NO: 34402 - DNA, 15 bp, Homo sapiens
agcactgctaattta

SEQ ID NO: 34403 - DNA, 15 bp, Homo sapiens
gcactgctaatttac

SEQ ID NO: 34404 - DNA, 15 bp, Homo sapiens
cactgctaatttaca

SEQ ID NO: 34405 - DNA, 15 bp, Homo sapiens
actgctaatttacac

SEQ ID NO: 34406 - DNA, 15 bp, Homo sapiens
ctgctaatttacact

SEQ ID NO: 34407 - DNA, 15 bp, Homo sapiens
tgctaatttacactg

SEQ ID NO: 34408 - DNA, 15 bp, Homo sapiens
gctaatttacactgc

SEQ ID NO: 34409 - DNA, 15 bp, Homo sapiens
ctaatttacactgca

SEQ ID NO: 34410 - DNA, 15 bp, Homo sapiens
taatttacactgcaa

SEQ ID NO: 34411 - DNA, 15 bp, Homo sapiens
aatttacactgcaaa

SEQ ID NO: 34412 - DNA, 15 bp, Homo sapiens
atttacactgcaaaa

SEQ ID NO: 34413 - DNA, 15 bp, Homo sapiens
tttacactgcaaaat

SEQ ID NO: 34414 - DNA, 15 bp, Homo sapiens
ttacactgcaaaata

SEQ ID NO: 34415 - DNA, 15 bp, Homo sapiens
tacactgcaaaatac

SEQ ID NO: 34416 - DNA, 15 bp, Homo sapiens
acactgcaaaataca

SEQ ID NO: 34417 - DNA, 15 bp, Homo sapiens
cactgcaaaatacac

SEQ ID NO: 34418 - DNA, 15 bp, Homo sapiens
actgcaaaatacact

SEQ ID NO: 34419 - DNA, 15 bp, Homo sapiens
ctgcaaaatacactt

SEQ ID NO: 34420 - DNA, 15 bp, Homo sapiens
tgcaaaatacactta

SEQ ID NO: 34421 - DNA, 15 bp, Homo sapiens
gcaaaatacacttat

SEQ ID NO: 34422 - DNA, 15 bp, Homo sapiens
caaaatacacttata

SEQ ID NO: 34423 - DNA, 15 bp, Homo sapiens
aaaatacacttatag

SEQ ID NO: 34424 - DNA, 15 bp, Homo sapiens
aaatacacttatagt

SEQ ID NO: 34425 - DNA, 15 bp, Homo sapiens
aatacacttatagtg

SEQ ID NO: 34426 - DNA, 15 bp, Homo sapiens
atacacttatagtgc

SEQ ID NO: 34427 - DNA, 15 bp, Homo sapiens
tacacttatagtgct

SEQ ID NO: 34428 - DNA, 15 bp, Homo sapiens
acacttatagtgctt

SEQ ID NO: 34429 - DNA, 15 bp, Homo sapiens
cacttatagtgctta

SEQ ID NO: 34430 - DNA, 15 bp, Homo sapiens
acttatagtgcttaa

SEQ ID NO: 34431 - DNA, 15 bp, Homo sapiens
cttatagtgcttaaa

SEQ ID NO: 34432 - DNA, 15 bp, Homo sapiens
ttatagtgcttaaaa

SEQ ID NO: 34433 - DNA, 15 bp, Homo sapiens
tatagtgcttaaaaa

SEQ ID NO: 34434 - DNA, 15 bp, Homo sapiens
atagtgcttaaaaaa

SEQ ID NO: 34435 - DNA, 15 bp, Homo sapiens
tagtgcttaaaaaaa

SEQ ID NO: 34436 - DNA, 15 bp, Homo sapiens
agtgcttaaaaaaaa

SEQ ID NO: 34437 - DNA, 15 bp, Homo sapiens
gtgcttaaaaaaaag

SEQ ID NO: 34438 - DNA, 15 bp, Homo sapiens
tgcttaaaaaaaagg

SEQ ID NO: 34439 - DNA, 15 bp, Homo sapiens
gcttaaaaaaaagga

SEQ ID NO: 34440 - DNA, 15 bp, Homo sapiens
cttaaaaaaaaggat

SEQ ID NO: 34441 - DNA, 15 bp, Homo sapiens
ttaaaaaaaaggatc

SEQ ID NO: 34442 - DNA, 15 bp, Homo sapiens
taaaaaaaaggatca

SEQ ID NO: 34443 - DNA, 15 bp, Homo sapiens
aaaaaaaaggatcac

SEQ ID NO: 34444 - DNA, 15 bp, Homo sapiens
aaaaaaaggatcact

SEQ ID NO: 34445 - DNA, 15 bp, Homo sapiens
aaaaaaggatcactg

SEQ ID NO: 34446 - DNA, 15 bp, Homo sapiens
aaaaaggatcactgt

SEQ ID NO: 34447 - DNA, 15 bp, Homo sapiens
aaaaggatcactgta

SEQ ID NO: 34448 - DNA, 15 bp, Homo sapiens
aaaggatcactgtat

SEQ ID NO: 34449 - DNA, 15 bp, Homo sapiens
aaggatcactgtatt

SEQ ID NO: 34450 - DNA, 15 bp, Homo sapiens
aggatcactgtatta

SEQ ID NO: 34451 - DNA, 15 bp, Homo sapiens
ggatcactgtattaa

SEQ ID NO: 34452 - DNA, 15 bp, Homo sapiens
gatcactgtattaat

SEQ ID NO: 34453 - DNA, 15 bp, Homo sapiens
atcactgtattaata

SEQ ID NO: 34454 - DNA, 15 bp, Homo sapiens
tcactgtattaatag

SEQ ID NO: 34455 - DNA, 15 bp, Homo sapiens
cactgtattaatagt

SEQ ID NO: 34456 - DNA, 15 bp, Homo sapiens
actgtattaatagta

SEQ ID NO: 34457 - DNA, 15 bp, Homo sapiens
ctgtattaatagtac

SEQ ID NO: 34458 - DNA, 15 bp, Homo sapiens
tgtattaatagtact

SEQ ID NO: 34459 - DNA, 15 bp, Homo sapiens
gtattaatagtactg

SEQ ID NO: 34460 - DNA, 15 bp, Homo sapiens
tattaatagtactgc

SEQ ID NO: 34461 - DNA, 15 bp, Homo sapiens
attaatagtactgcc

SEQ ID NO: 34462 - DNA, 15 bp, Homo sapiens
ttaatagtactgcct

SEQ ID NO: 34463 - DNA, 15 bp, Homo sapiens
taatagtactgccta

SEQ ID NO: 34464 - DNA, 15 bp, Homo sapiens
aatagtactgcctag

SEQ ID NO: 34465 - DNA, 15 bp, Homo sapiens
atagtactgcctagg

SEQ ID NO: 34466 - DNA, 15 bp, Homo sapiens
tagtactgcctagga

SEQ ID NO: 34467 - DNA, 15 bp, Homo sapiens
agtactgcctaggat

SEQ ID NO: 34468 - DNA, 15 bp, Homo sapiens
gtactgcctaggatt

SEQ ID NO: 34469 - DNA, 15 bp, Homo sapiens
tactgcctaggattc

SEQ ID NO: 34470 - DNA, 15 bp, Homo sapiens
actgcctaggattcc

SEQ ID NO: 34471 - DNA, 15 bp, Homo sapiens
ctgcctaggattccc

SEQ ID NO: 34472 - DNA, 15 bp, Homo sapiens
tgcctaggattccct

SEQ ID NO: 34473 - DNA, 15 bp, Homo sapiens
gcctaggattccctc

SEQ ID NO: 34474 - DNA, 15 bp, Homo sapiens
cctaggattccctca

SEQ ID NO: 34475 - DNA, 15 bp, Homo sapiens
ctaggattccctcaa

SEQ ID NO: 34476 - DNA, 15 bp, Homo sapiens
taggattccctcaag

SEQ ID NO: 34477 - DNA, 15 bp, Homo sapiens
aggattccctcaagg

SEQ ID NO: 34478 - DNA, 15 bp, Homo sapiens
ggattccctcaaggc

SEQ ID NO: 34479 - DNA, 15 bp, Homo sapiens
gattccctcaaggca

SEQ ID NO: 34480 - DNA, 15 bp, Homo sapiens
attccctcaaggcat

SEQ ID NO: 34481 - DNA, 15 bp, Homo sapiens
ttccctcaaggcatt

SEQ ID NO: 34482 - DNA, 15 bp, Homo sapiens
tccctcaaggcattt

SEQ ID NO: 34483 - DNA, 15 bp, Homo sapiens
ccctcaaggcatttc

SEQ ID NO: 34484 - DNA, 15 bp, Homo sapiens
cctcaaggcatttct

SEQ ID NO: 34485 - DNA, 15 bp, Homo sapiens
ctcaaggcatttcta

SEQ ID NO: 34486 - DNA, 15 bp, Homo sapiens
tcaaggcatttctaa

SEQ ID NO: 34487 - DNA, 15 bp, Homo sapiens
caaggcatttctaaa

SEQ ID NO: 34488 - DNA, 15 bp, Homo sapiens
aaggcatttctaaac

SEQ ID NO: 34489 - DNA, 15 bp, Homo sapiens
aggcatttctaaacc

SEQ ID NO: 34490 - DNA, 15 bp, Homo sapiens
ggcatttctaaacca

SEQ ID NO: 34491 - DNA, 15 bp, Homo sapiens
gcatttctaaaccac

SEQ ID NO: 34492 - DNA, 15 bp, Homo sapiens
catttctaaaccaca

SEQ ID NO: 34493 - DNA, 15 bp, Homo sapiens
atttctaaaccacaa

SEQ ID NO: 34494 - DNA, 15 bp, Homo sapiens
tttctaaaccacaag

SEQ ID NO: 34495 - DNA, 15 bp, Homo sapiens
ttctaaaccacaagt

SEQ ID NO: 34496 - DNA, 15 bp, Homo sapiens
tctaaaccacaagtt

SEQ ID NO: 34497 - DNA, 15 bp, Homo sapiens
ctaaaccacaagttt

SEQ ID NO: 34498 - DNA, 15 bp, Homo sapiens
taaaccacaagtttc

SEQ ID NO: 34499 - DNA, 15 bp, Homo sapiens
aaaccacaagtttct

SEQ ID NO: 34500 - DNA, 15 bp, Homo sapiens
aaccacaagtttctt

SEQ ID NO: 34501 - DNA, 15 bp, Homo sapiens
accacaagtttctta

SEQ ID NO: 34502 - DNA, 15 bp, Homo sapiens
ccacaagtttcttag

SEQ ID NO: 34503 - DNA, 15 bp, Homo sapiens
cacaagtttcttagg

SEQ ID NO: 34504 - DNA, 15 bp, Homo sapiens
acaagtttcttaggt

SEQ ID NO: 34505 - DNA, 15 bp, Homo sapiens
caagtttcttaggtt

SEQ ID NO: 34506 - DNA, 15 bp, Homo sapiens
aagtttcttaggttt

SEQ ID NO: 34507 - DNA, 15 bp, Homo sapiens
agtttcttaggtttc

SEQ ID NO: 34508 - DNA, 15 bp, Homo sapiens
gtttcttaggtttct

SEQ ID NO: 34509 - DNA, 15 bp, Homo sapiens
tttcttaggtttctc

SEQ ID NO: 34510 - DNA, 15 bp, Homo sapiens
ttcttaggtttctcc

SEQ ID NO: 34511 - DNA, 15 bp, Homo sapiens
tcttaggtttctcct

SEQ ID NO: 34512 - DNA, 15 bp, Homo sapiens
cttaggtttctccta

SEQ ID NO: 34513 - DNA, 15 bp, Homo sapiens
ttaggtttctcctat

SEQ ID NO: 34514 - DNA, 15 bp, Homo sapiens
taggtttctcctatt

SEQ ID NO: 34515 - DNA, 15 bp, Homo sapiens
aggtttctcctatta

SEQ ID NO: 34516 - DNA, 15 bp, Homo sapiens
ggtttctcctattac

SEQ ID NO: 34517 - DNA, 15 bp, Homo sapiens
gtttctcctattact

SEQ ID NO: 34518 - DNA, 15 bp, Homo sapiens
tttctcctattactc

SEQ ID NO: 34519 - DNA, 15 bp, Homo sapiens
ttctcctattactca

SEQ ID NO: 34520 - DNA, 15 bp, Homo sapiens
tctcctattactcaa

SEQ ID NO: 34521 - DNA, 15 bp, Homo sapiens
ctcctattactcaaa

SEQ ID NO: 34522 - DNA, 15 bp, Homo sapiens
tcctattactcaaat

SEQ ID NO: 34523 - DNA, 15 bp, Homo sapiens
cctattactcaaata

SEQ ID NO: 34524 - DNA, 15 bp, Homo sapiens
ctattactcaaatac

SEQ ID NO: 34525 - DNA, 15 bp, Homo sapiens
tattactcaaatacg

SEQ ID NO: 34526 - DNA, 15 bp, Homo sapiens
attactcaaatacgc

SEQ ID NO: 34527 - DNA, 15 bp, Homo sapiens
ttactcaaatacgcc

SEQ ID NO: 34528 - DNA, 15 bp, Homo sapiens
tactcaaatacgccc

SEQ ID NO: 34529 - DNA, 15 bp, Homo sapiens
actcaaatacgcccc

SEQ ID NO: 34530 - DNA, 15 bp, Homo sapiens
ctcaaatacgccccc

SEQ ID NO: 34531 - DNA, 15 bp, Homo sapiens
tcaaatacgccccca

SEQ ID NO: 34532 - DNA, 15 bp, Homo sapiens
caaatacgcccccag

SEQ ID NO: 34533 - DNA, 15 bp, Homo sapiens
aaatacgcccccagg

SEQ ID NO: 34534 - DNA, 15 bp, Homo sapiens
aatacgcccccaggt

SEQ ID NO: 34535 - DNA, 15 bp, Homo sapiens
atacgcccccaggtg

SEQ ID NO: 34536 - DNA, 15 bp, Homo sapiens
tacgcccccaggtgg

SEQ ID NO: 34537 - DNA, 15 bp, Homo sapiens
acgcccccaggtggt

SEQ ID NO: 34538 - DNA, 15 bp, Homo sapiens
cgcccccaggtggtc

SEQ ID NO: 34539 - DNA, 15 bp, Homo sapiens
gcccccaggtggtca

SEQ ID NO: 34540 - DNA, 15 bp, Homo sapiens
cccccaggtggtcac

SEQ ID NO: 34541 - DNA, 15 bp, Homo sapiens
ccccaggtggtcaca

SEQ ID NO: 34542 - DNA, 15 bp, Homo sapiens
cccaggtggtcacaa

SEQ ID NO: 34543 - DNA, 15 bp, Homo sapiens
ccaggtggtcacaac

SEQ ID NO: 34544 - DNA, 15 bp, Homo sapiens
caggtggtcacaaca

SEQ ID NO: 34545 - DNA, 15 bp, Homo sapiens
aggtggtcacaacag

SEQ ID NO: 34546 - DNA, 15 bp, Homo sapiens
ggtggtcacaacaga

SEQ ID NO: 34547 - DNA, 15 bp, Homo sapiens
gtggtcacaacagat

SEQ ID NO: 34548 - DNA, 15 bp, Homo sapiens
tggtcacaacagatc

SEQ ID NO: 34549 - DNA, 15 bp, Homo sapiens
ggtcacaacagatca

SEQ ID NO: 34550 - DNA, 15 bp, Homo sapiens
gtcacaacagatcac

SEQ ID NO: 34551 - DNA, 15 bp, Homo sapiens
tcacaacagatcact

SEQ ID NO: 34552 - DNA, 15 bp, Homo sapiens
cacaacagatcacta

SEQ ID NO: 34553 - DNA, 15 bp, Homo sapiens
acaacagatcactac

SEQ ID NO: 34554 - DNA, 15 bp, Homo sapiens
caacagatcactaca

SEQ ID NO: 34555 - DNA, 15 bp, Homo sapiens
aacagatcactacaa

SEQ ID NO: 34556 - DNA, 15 bp, Homo sapiens
acagatcactacaaa

SEQ ID NO: 34557 - DNA, 15 bp, Homo sapiens
cagatcactacaaat

SEQ ID NO: 34558 - DNA, 15 bp, Homo sapiens
agatcactacaaata

SEQ ID NO: 34559 - DNA, 15 bp, Homo sapiens
gatcactacaaatag

SEQ ID NO: 34560 - DNA, 15 bp, Homo sapiens
atcactacaaataga

SEQ ID NO: 34561 - DNA, 15 bp, Homo sapiens
tcactacaaatagaa

SEQ ID NO: 34562 - DNA, 15 bp, Homo sapiens
cactacaaatagaaa

SEQ ID NO: 34563 - DNA, 15 bp, Homo sapiens
actacaaatagaaat

SEQ ID NO: 34564 - DNA, 15 bp, Homo sapiens
ctacaaatagaaata

SEQ ID NO: 34565 - DNA, 15 bp, Homo sapiens
tacaaatagaaataa

SEQ ID NO: 34566 - DNA, 15 bp, Homo sapiens
acaaatagaaataaa

SEQ ID NO: 34567 - DNA, 15 bp, Homo sapiens
caaatagaaataaaa

SEQ ID NO: 34568 - DNA, 15 bp, Homo sapiens
aaatagaaataaaat

SEQ ID NO: 34569 - DNA, 15 bp, Homo sapiens
aatagaaataaaatt

SEQ ID NO: 34570 - DNA, 15 bp, Homo sapiens
atagaaataaaattc

SEQ ID NO: 34571 - DNA, 15 bp, Homo sapiens
tagaaataaaattca

SEQ ID NO: 34572 - DNA, 15 bp, Homo sapiens
agaaataaaattcat

SEQ ID NO: 34573 - DNA, 15 bp, Homo sapiens
gaaataaaattcatc

SEQ ID NO: 34574 - DNA, 15 bp, Homo sapiens
aaataaaattcatcc

SEQ ID NO: 34575 - DNA, 15 bp, Homo sapiens
aataaaattcatcct

SEQ ID NO: 34576 - DNA, 15 bp, Homo sapiens
ataaaattcatcctt

SEQ ID NO: 34577 - DNA, 15 bp, Homo sapiens
taaaattcatcctta

SEQ ID NO: 34578 - DNA, 15 bp, Homo sapiens
aaaattcatccttac

SEQ ID NO: 34579 - DNA, 15 bp, Homo sapiens
aaattcatccttacc

SEQ ID NO: 34580 - DNA, 15 bp, Homo sapiens
aattcatccttacca

SEQ ID NO: 34581 - DNA, 15 bp, Homo sapiens
attcatccttaccac

SEQ ID NO: 34582 - DNA, 15 bp, Homo sapiens
ttcatccttaccact

SEQ ID NO: 34583 - DNA, 15 bp, Homo sapiens
tcatccttaccactc

SEQ ID NO: 34584 - DNA, 15 bp, Homo sapiens
catccttaccactcc

SEQ ID NO: 34585 - DNA, 15 bp, Homo sapiens
atccttaccactcca

SEQ ID NO: 34586 - DNA, 15 bp, Homo sapiens
tccttaccactccat

SEQ ID NO: 34587 - DNA, 15 bp, Homo sapiens
ccttaccactccatt

SEQ ID NO: 34588 - DNA, 15 bp, Homo sapiens
cttaccactccatta

SEQ ID NO: 34589 - DNA, 15 bp, Homo sapiens
ttaccactccattaa

SEQ ID NO: 34590 - DNA, 15 bp, Homo sapiens
taccactccattaac

SEQ ID NO: 34591 - DNA, 15 bp, Homo sapiens
accactccattaaca

SEQ ID NO: 34592 - DNA, 15 bp, Homo sapiens
ccactccattaacag

SEQ ID NO: 34593 - DNA, 15 bp, Homo sapiens
cactccattaacaga

SEQ ID NO: 34594 - DNA, 15 bp, Homo sapiens
actccattaacagag

SEQ ID NO: 34595 - DNA, 15 bp, Homo sapiens
ctccattaacagaga

SEQ ID NO: 34596 - DNA, 15 bp, Homo sapiens
tccattaacagagag

SEQ ID NO: 34597 - DNA, 15 bp, Homo sapiens
ccattaacagagagg

SEQ ID NO: 34598 - DNA, 15 bp, Homo sapiens
cattaacagagagga

SEQ ID NO: 34599 - DNA, 15 bp, Homo sapiens
attaacagagaggag

SEQ ID NO: 34600 - DNA, 15 bp, Homo sapiens
ttaacagagaggagt

SEQ ID NO: 34601 - DNA, 15 bp, Homo sapiens
taacagagaggagtt

SEQ ID NO: 34602 - DNA, 15 bp, Homo sapiens
aacagagaggagttg

SEQ ID NO: 34603 - DNA, 15 bp, Homo sapiens
acagagaggagttga

SEQ ID NO: 34604 - DNA, 15 bp, Homo sapiens
cagagaggagttgat

SEQ ID NO: 34605 - DNA, 15 bp, Homo sapiens
agagaggagttgatc

SEQ ID NO: 34606 - DNA, 15 bp, Homo sapiens
gagaggagttgatct

SEQ ID NO: 34607 - DNA, 15 bp, Homo sapiens
agaggagttgatctc

SEQ ID NO: 34608 - DNA, 15 bp, Homo sapiens
gaggagttgatctcc

SEQ ID NO: 34609 - DNA, 15 bp, Homo sapiens
aggagttgatctcca

SEQ ID NO: 34610 - DNA, 15 bp, Homo sapiens
ggagttgatctccac

SEQ ID NO: 34611 - DNA, 15 bp, Homo sapiens
gagttgatctccacg

SEQ ID NO: 34612 - DNA, 15 bp, Homo sapiens
agttgatctccacgt

SEQ ID NO: 34613 - DNA, 15 bp, Homo sapiens
gttgatctccacgtt

SEQ ID NO: 34614 - DNA, 15 bp, Homo sapiens
ttgatctccacgttt

SEQ ID NO: 34615 - DNA, 15 bp, Homo sapiens
tgatctccacgtttg

SEQ ID NO: 34616 - DNA, 15 bp, Homo sapiens
gatctccacgtttga

SEQ ID NO: 34617 - DNA, 15 bp, Homo sapiens
atctccacgtttgag

SEQ ID NO: 34618 - DNA, 15 bp, Homo sapiens
tctccacgtttgagg

SEQ ID NO: 34619 - DNA, 15 bp, Homo sapiens
ctccacgtttgaggc

SEQ ID NO: 34620 - DNA, 15 bp, Homo sapiens
tccacgtttgaggcc

SEQ ID NO: 34621 - DNA, 15 bp, Homo sapiens
ccacgtttgaggccc

SEQ ID NO: 34622 - DNA, 15 bp, Homo sapiens
cacgtttgaggcccc

SEQ ID NO: 34623 - DNA, 15 bp, Homo sapiens
acgtttgaggccccc

SEQ ID NO: 34624 - DNA, 15 bp, Homo sapiens
cgtttgaggccccca

SEQ ID NO: 34625 - DNA, 15 bp, Homo sapiens
gtttgaggcccccat

SEQ ID NO: 34626 - DNA, 15 bp, Homo sapiens
tttgaggcccccatg

SEQ ID NO: 34627 - DNA, 15 bp, Homo sapiens
ttgaggcccccatgt

SEQ ID NO: 34628 - DNA, 15 bp, Homo sapiens
tgaggcccccatgtc

SEQ ID NO: 34629 - DNA, 15 bp, Homo sapiens
gaggcccccatgtct

SEQ ID NO: 34630 - DNA, 15 bp, Homo sapiens
aggcccccatgtcta

SEQ ID NO: 34631 - DNA, 15 bp, Homo sapiens
ggcccccatgtctat

SEQ ID NO: 34632 - DNA, 15 bp, Homo sapiens
gcccccatgtctatc

SEQ ID NO: 34633 - DNA, 15 bp, Homo sapiens
cccccatgtctatca

SEQ ID NO: 34634 - DNA, 15 bp, Homo sapiens
ccccatgtctatcag

SEQ ID NO: 34635 - DNA, 15 bp, Homo sapiens
cccatgtctatcagc

SEQ ID NO: 34636 - DNA, 15 bp, Homo sapiens
ccatgtctatcagca

SEQ ID NO: 34637 - DNA, 15 bp, Homo sapiens
catgtctatcagcaa

SEQ ID NO: 34638 - DNA, 15 bp, Homo sapiens
atgtctatcagcaat

SEQ ID NO: 34639 - DNA, 15 bp, Homo sapiens
tgtctatcagcaatt

SEQ ID NO: 34640 - DNA, 15 bp, Homo sapiens
gtctatcagcaattc

SEQ ID NO: 34641 - DNA, 15 bp, Homo sapiens
tctatcagcaattcc

SEQ ID NO: 34642 - DNA, 15 bp, Homo sapiens
ctatcagcaattcca

SEQ ID NO: 34643 - DNA, 15 bp, Homo sapiens
tatcagcaattccac

SEQ ID NO: 34644 - DNA, 15 bp, Homo sapiens
atcagcaattccacc

SEQ ID NO: 34645 - DNA, 15 bp, Homo sapiens
tcagcaattccacct

SEQ ID NO: 34646 - DNA, 15 bp, Homo sapiens
cagcaattccacctg

SEQ ID NO: 34647 - DNA, 15 bp, Homo sapiens
agcaattccacctgg

SEQ ID NO: 34648 - DNA, 15 bp, Homo sapiens
gcaattccacctgga

SEQ ID NO: 34649 - DNA, 15 bp, Homo sapiens
caattccacctggaa

SEQ ID NO: 34650 - DNA, 15 bp, Homo sapiens
aattccacctggaat

SEQ ID NO: 34651 - DNA, 15 bp, Homo sapiens
attccacctggaatt

SEQ ID NO: 34652 - DNA, 15 bp, Homo sapiens
ttccacctggaatta

SEQ ID NO: 34653 - DNA, 15 bp, Homo sapiens
tccacctggaattat

SEQ ID NO: 34654 - DNA, 15 bp, Homo sapiens
ccacctggaattatt

SEQ ID NO: 34655 - DNA, 15 bp, Homo sapiens
cacctggaattattc

SEQ ID NO: 34656 - DNA, 15 bp, Homo sapiens
acctggaattattcg

SEQ ID NO: 34657 - DNA, 15 bp, Homo sapiens
cctggaattattcgg

SEQ ID NO: 34658 - DNA, 15 bp, Homo sapiens
ctggaattattcggg

SEQ ID NO: 34659 - DNA, 15 bp, Homo sapiens
tggaattattcggga

SEQ ID NO: 34660 - DNA, 15 bp, Homo sapiens
ggaattattcgggat

SEQ ID NO: 34661 - DNA, 15 bp, Homo sapiens
gaattattcgggata

SEQ ID NO: 34662 - DNA, 15 bp, Homo sapiens
aattattcgggatat

SEQ ID NO: 34663 - DNA, 15 bp, Homo sapiens
attattcgggatata

SEQ ID NO: 34664 - DNA, 15 bp, Homo sapiens
ttattcgggatatat

SEQ ID NO: 34665 - DNA, 15 bp, Homo sapiens
tattcgggatatata

SEQ ID NO: 34666 - DNA, 15 bp, Homo sapiens
attcgggatatatag

SEQ ID NO: 34667 - DNA, 15 bp, Homo sapiens
ttcgggatatataga

SEQ ID NO: 34668 - DNA, 15 bp, Homo sapiens
tcgggatatatagat

SEQ ID NO: 34669 - DNA, 15 bp, Homo sapiens
cgggatatatagatt

SEQ ID NO: 34670 - DNA, 15 bp, Homo sapiens
gggatatatagattg

SEQ ID NO: 34671 - DNA, 15 bp, Homo sapiens
ggatatatagattgg

SEQ ID NO: 34672 - DNA, 15 bp, Homo sapiens
gatatatagattgga

SEQ ID NO: 34673 - DNA, 15 bp, Homo sapiens
atatatagattggag

SEQ ID NO: 34674 - DNA, 15 bp, Homo sapiens
tatatagattggaga

SEQ ID NO: 34675 - DNA, 15 bp, Homo sapiens
atatagattggagag

SEQ ID NO: 34676 - DNA, 15 bp, Homo sapiens
tatagattggagagt

SEQ ID NO: 34677 - DNA, 15 bp, Homo sapiens
atagattggagagtt

SEQ ID NO: 34678 - DNA, 15 bp, Homo sapiens
tagattggagagttt

SEQ ID NO: 34679 - DNA, 15 bp, Homo sapiens
agattggagagtttt

SEQ ID NO: 34680 - DNA, 15 bp, Homo sapiens
gattggagagttttg

SEQ ID NO: 34681 - DNA, 15 bp, Homo sapiens
attggagagttttgt

SEQ ID NO: 34682 - DNA, 15 bp, Homo sapiens
ttggagagttttgtt

SEQ ID NO: 34683 - DNA, 15 bp, Homo sapiens
tggagagttttgttc

SEQ ID NO: 34684 - DNA, 15 bp, Homo sapiens
ggagagttttgttct

SEQ ID NO: 34685 - DNA, 15 bp, Homo sapiens
gagagttttgttctt

SEQ ID NO: 34686 - DNA, 15 bp, Homo sapiens
agagttttgttcttt

SEQ ID NO: 34687 - DNA, 15 bp, Homo sapiens
gagttttgttctttg

SEQ ID NO: 34688 - DNA, 15 bp, Homo sapiens
agttttgttctttgc

SEQ ID NO: 34689 - DNA, 15 bp, Homo sapiens
gttttgttctttgcc

SEQ ID NO: 34690 - DNA, 15 bp, Homo sapiens
ttttgttctttgcct

SEQ ID NO: 34691 - DNA, 15 bp, Homo sapiens
tttgttctttgcctc

SEQ ID NO: 34692 - DNA, 15 bp, Homo sapiens
ttgttctttgcctcc

SEQ ID NO: 34693 - DNA, 15 bp, Homo sapiens
tgttctttgcctccc

SEQ ID NO: 34694 - DNA, 15 bp, Homo sapiens
gttctttgcctccca

SEQ ID NO: 34695 - DNA, 15 bp, Homo sapiens
ttctttgcctcccat

SEQ ID NO: 34696 - DNA, 15 bp, Homo sapiens
tctttgcctcccata

SEQ ID NO: 34697 - DNA, 15 bp, Homo sapiens
ctttgcctcccataa

SEQ ID NO: 34698 - DNA, 15 bp, Homo sapiens
tttgcctcccataat

SEQ ID NO: 34699 - DNA, 15 bp, Homo sapiens
ttgcctcccataata

SEQ ID NO: 34700 - DNA, 15 bp, Homo sapiens
tgcctcccataatat

SEQ ID NO: 34701 - DNA, 15 bp, Homo sapiens
gcctcccataatatt

SEQ ID NO: 34702 - DNA, 15 bp, Homo sapiens
cctcccataatattg

SEQ ID NO: 34703 - DNA, 15 bp, Homo sapiens
ctcccataatattga

SEQ ID NO: 34704 - DNA, 15 bp, Homo sapiens
tcccataatattgaa

SEQ ID NO: 34705 - DNA, 15 bp, Homo sapiens
cccataatattgaat

SEQ ID NO: 34706 - DNA, 15 bp, Homo sapiens
ccataatattgaatc

SEQ ID NO: 34707 - DNA, 15 bp, Homo sapiens
cataatattgaatcc

SEQ ID NO: 34708 - DNA, 15 bp, Homo sapiens
ataatattgaatcca

SEQ ID NO: 34709 - DNA, 15 bp, Homo sapiens
taatattgaatccaa

SEQ ID NO: 34710 - DNA, 15 bp, Homo sapiens
aatattgaatccaag

SEQ ID NO: 34711 - DNA, 15 bp, Homo sapiens
atattgaatccaagg

SEQ ID NO: 34712 - DNA, 15 bp, Homo sapiens
tattgaatccaaggc

SEQ ID NO: 34713 - DNA, 15 bp, Homo sapiens
attgaatccaaggcc

SEQ ID NO: 34714 - DNA, 15 bp, Homo sapiens
ttgaatccaaggccc

SEQ ID NO: 34715 - DNA, 15 bp, Homo sapiens
tgaatccaaggccct

SEQ ID NO: 34716 - DNA, 15 bp, Homo sapiens
gaatccaaggccctc

SEQ ID NO: 34717 - DNA, 15 bp, Homo sapiens
aatccaaggccctct

SEQ ID NO: 34718 - DNA, 15 bp, Homo sapiens
atccaaggccctctt

SEQ ID NO: 34719 - DNA, 15 bp, Homo sapiens
tccaaggccctcttc

SEQ ID NO: 34720 - DNA, 15 bp, Homo sapiens
ccaaggccctcttct

SEQ ID NO: 34721 - DNA, 15 bp, Homo sapiens
caaggccctcttctg

SEQ ID NO: 34722 - DNA, 15 bp, Homo sapiens
aaggccctcttctgt

SEQ ID NO: 34723 - DNA, 15 bp, Homo sapiens
aggccctcttctgtt

SEQ ID NO: 34724 - DNA, 15 bp, Homo sapiens
ggccctcttctgttt

SEQ ID NO: 34725 - DNA, 15 bp, Homo sapiens
gccctcttctgtttt

SEQ ID NO: 34726 - DNA, 15 bp, Homo sapiens
ccctcttctgttttt

SEQ ID NO: 34727 - DNA, 15 bp, Homo sapiens
cctcttctgtttttg

SEQ ID NO: 34728 - DNA, 15 bp, Homo sapiens
ctcttctgtttttgg

SEQ ID NO: 34729 - DNA, 15 bp, Homo sapiens
tcttctgtttttggt

SEQ ID NO: 34730 - DNA, 15 bp, Homo sapiens
cttctgtttttggta

SEQ ID NO: 34731 - DNA, 15 bp, Homo sapiens
ttctgtttttggtag

SEQ ID NO: 34732 - DNA, 15 bp, Homo sapiens
tctgtttttggtagc

SEQ ID NO: 34733 - DNA, 15 bp, Homo sapiens
ctgtttttggtagct

SEQ ID NO: 34734 - DNA, 15 bp, Homo sapiens
tgtttttggtagctc

SEQ ID NO: 34735 - DNA, 15 bp, Homo sapiens
gtttttggtagctca

SEQ ID NO: 34736 - DNA, 15 bp, Homo sapiens
tttttggtagctcaa

SEQ ID NO: 34737 - DNA, 15 bp, Homo sapiens
ttttggtagctcaac

SEQ ID NO: 34738 - DNA, 15 bp, Homo sapiens
tttggtagctcaaca

SEQ ID NO: 34739 - DNA, 15 bp, Homo sapiens
ttggtagctcaacaa

SEQ ID NO: 34740 - DNA, 15 bp, Homo sapiens
tggtagctcaacaac

SEQ ID NO: 34741 - DNA, 15 bp, Homo sapiens
ggtagctcaacaact

SEQ ID NO: 34742 - DNA, 15 bp, Homo sapiens
gtagctcaacaactc

SEQ ID NO: 34743 - DNA, 15 bp, Homo sapiens
tagctcaacaactcg

SEQ ID NO: 34744 - DNA, 15 bp, Homo sapiens
agctcaacaactcga

SEQ ID NO: 34745 - DNA, 15 bp, Homo sapiens
gctcaacaactcgag

SEQ ID NO: 34746 - DNA, 15 bp, Homo sapiens
ctcaacaactcgagg

SEQ ID NO: 34747 - DNA, 15 bp, Homo sapiens
tcaacaactcgagga

SEQ ID NO: 34748 - DNA, 15 bp, Homo sapiens
caacaactcgaggat

SEQ ID NO: 34749 - DNA, 15 bp, Homo sapiens
aacaactcgaggatg

SEQ ID NO: 34750 - DNA, 15 bp, Homo sapiens
acaactcgaggatga

SEQ ID NO: 34751 - DNA, 15 bp, Homo sapiens
caactcgaggatgag

SEQ ID NO: 34752 - DNA, 15 bp, Homo sapiens
aactcgaggatgaga

SEQ ID NO: 34753 - DNA, 15 bp, Homo sapiens
actcgaggatgagaa

SEQ ID NO: 34754 - DNA, 15 bp, Homo sapiens
ctcgaggatgagaat

SEQ ID NO: 34755 - DNA, 15 bp, Homo sapiens
tcgaggatgagaatg

SEQ ID NO: 34756 - DNA, 15 bp, Homo sapiens
cgaggatgagaatgt

SEQ ID NO: 34757 - DNA, 15 bp, Homo sapiens
gaggatgagaatgtc

SEQ ID NO: 34758 - DNA, 15 bp, Homo sapiens
aggatgagaatgtcc

SEQ ID NO: 34759 - DNA, 15 bp, Homo sapiens
ggatgagaatgtcct

SEQ ID NO: 34760 - DNA, 15 bp, Homo sapiens
gatgagaatgtcctt

SEQ ID NO: 34761 - DNA, 15 bp, Homo sapiens
atgagaatgtccttc

SEQ ID NO: 34762 - DNA, 15 bp, Homo sapiens
tgagaatgtccttca

SEQ ID NO: 34763 - DNA, 15 bp, Homo sapiens
gagaatgtccttcac

SEQ ID NO: 34764 - DNA, 15 bp, Homo sapiens
agaatgtccttcact

SEQ ID NO: 34765 - DNA, 15 bp, Homo sapiens
gaatgtccttcactg

SEQ ID NO: 34766 - DNA, 15 bp, Homo sapiens
aatgtccttcactgg

SEQ ID NO: 34767 - DNA, 15 bp, Homo sapiens
atgtccttcactggc

SEQ ID NO: 34768 - DNA, 15 bp, Homo sapiens
tgtccttcactggca

SEQ ID NO: 34769 - DNA, 15 bp, Homo sapiens
gtccttcactggcag

SEQ ID NO: 34770 - DNA, 15 bp, Homo sapiens
tccttcactggcagc

SEQ ID NO: 34771 - DNA, 15 bp, Homo sapiens
ccttcactggcagca

SEQ ID NO: 34772 - DNA, 15 bp, Homo sapiens
cttcactggcagcaa

SEQ ID NO: 34773 - DNA, 15 bp, Homo sapiens
ttcactggcagcaaa

SEQ ID NO: 34774 - DNA, 15 bp, Homo sapiens
tcactggcagcaaat

SEQ ID NO: 34775 - DNA, 15 bp, Homo sapiens
cactggcagcaaatg

SEQ ID NO: 34776 - DNA, 15 bp, Homo sapiens
actggcagcaaatgc

SEQ ID NO: 34777 - DNA, 15 bp, Homo sapiens
ctggcagcaaatgca

SEQ ID NO: 34778 - DNA, 15 bp, Homo sapiens
tggcagcaaatgcag

SEQ ID NO: 34779 - DNA, 15 bp, Homo sapiens
ggcagcaaatgcagc

SEQ ID NO: 34780 - DNA, 15 bp, Homo sapiens
gcagcaaatgcagca

SEQ ID NO: 34781 - DNA, 15 bp, Homo sapiens
cagcaaatgcagcaa

SEQ ID NO: 34782 - DNA, 15 bp, Homo sapiens
agcaaatgcagcaac

SEQ ID NO: 34783 - DNA, 15 bp, Homo sapiens
gcaaatgcagcaaca

SEQ ID NO: 34784 - DNA, 15 bp, Homo sapiens
caaatgcagcaacag

SEQ ID NO: 34785 - DNA, 15 bp, Homo sapiens
aaatgcagcaacagt

SEQ ID NO: 34786 - DNA, 15 bp, Homo sapiens
aatgcagcaacagta

SEQ ID NO: 34787 - DNA, 15 bp, Homo sapiens
atgcagcaacagtag

SEQ ID NO: 34788 - DNA, 15 bp, Homo sapiens
tgcagcaacagtagc

SEQ ID NO: 34789 - DNA, 15 bp, Homo sapiens
gcagcaacagtagcc

SEQ ID NO: 34790 - DNA, 15 bp, Homo sapiens
cagcaacagtagcct

SEQ ID NO: 34791 - DNA, 15 bp, Homo sapiens
agcaacagtagcctg

SEQ ID NO: 34792 - DNA, 15 bp, Homo sapiens
gcaacagtagcctga

SEQ ID NO: 34793 - DNA, 15 bp, Homo sapiens
caacagtagcctgaa

SEQ ID NO: 34794 - DNA, 15 bp, Homo sapiens
aacagtagcctgaaa

SEQ ID NO: 34795 - DNA, 15 bp, Homo sapiens
acagtagcctgaaag

SEQ ID NO: 34796 - DNA, 15 bp, Homo sapiens
cagtagcctgaaaga

SEQ ID NO: 34797 - DNA, 15 bp, Homo sapiens
agtagcctgaaagaa

SEQ ID NO: 34798 - DNA, 15 bp, Homo sapiens
gtagcctgaaagaaa

SEQ ID NO: 34799 - DNA, 15 bp, Homo sapiens
tagcctgaaagaaag

SEQ ID NO: 34800 - DNA, 15 bp, Homo sapiens
agcctgaaagaaagt

SEQ ID NO: 34801 - DNA, 15 bp, Homo sapiens
gcctgaaagaaagtt

SEQ ID NO: 34802 - DNA, 15 bp, Homo sapiens
cctgaaagaaagttt

SEQ ID NO: 34803 - DNA, 15 bp, Homo sapiens
ctgaaagaaagtttt

SEQ ID NO: 34804 - DNA, 15 bp, Homo sapiens
tgaaagaaagtttta

SEQ ID NO: 34805 - DNA, 15 bp, Homo sapiens
gaaagaaagttttac

SEQ ID NO: 34806 - DNA, 15 bp, Homo sapiens
aaagaaagttttaca

SEQ ID NO: 34807 - DNA, 15 bp, Homo sapiens
aagaaagttttacat

SEQ ID NO: 34808 - DNA, 15 bp, Homo sapiens
agaaagttttacata

SEQ ID NO: 34809 - DNA, 15 bp, Homo sapiens
gaaagttttacatat

SEQ ID NO: 34810 - DNA, 15 bp, Homo sapiens
aaagttttacatatt

SEQ ID NO: 34811 - DNA, 15 bp, Homo sapiens
aagttttacatatta

SEQ ID NO: 34812 - DNA, 15 bp, Homo sapiens
agttttacatattaa

SEQ ID NO: 34813 - DNA, 15 bp, Homo sapiens
gttttacatattaaa

SEQ ID NO: 34814 - DNA, 15 bp, Homo sapiens
ttttacatattaaaa

SEQ ID NO: 34815 - DNA, 15 bp, Homo sapiens
tttacatattaaaaa

SEQ ID NO: 34816 - DNA, 15 bp, Homo sapiens
ttacatattaaaaat

SEQ ID NO: 34817 - DNA, 15 bp, Homo sapiens
tacatattaaaaata

SEQ ID NO: 34818 - DNA, 15 bp, Homo sapiens
acatattaaaaatat

SEQ ID NO: 34819 - DNA, 15 bp, Homo sapiens
catattaaaaatatg

SEQ ID NO: 34820 - DNA, 15 bp, Homo sapiens
atattaaaaatatga

SEQ ID NO: 34821 - DNA, 15 bp, Homo sapiens
tattaaaaatatgac

SEQ ID NO: 34822 - DNA, 15 bp, Homo sapiens
attaaaaatatgact

SEQ ID NO: 34823 - DNA, 15 bp, Homo sapiens
ttaaaaatatgactt

SEQ ID NO: 34824 - DNA, 15 bp, Homo sapiens
taaaaatatgacttt

SEQ ID NO: 34825 - DNA, 15 bp, Homo sapiens
aaaaatatgactttt

SEQ ID NO: 34826 - DNA, 15 bp, Homo sapiens
aaaatatgactttta

SEQ ID NO: 34827 - DNA, 15 bp, Homo sapiens
aaatatgacttttat

SEQ ID NO: 34828 - DNA, 15 bp, Homo sapiens
aatatgacttttatt

SEQ ID NO: 34829 - DNA, 15 bp, Homo sapiens
atatgacttttattt

SEQ ID NO: 34830 - DNA, 15 bp, Homo sapiens
tatgacttttattta

SEQ ID NO: 34831 - DNA, 15 bp, Homo sapiens
atgacttttatttac

SEQ ID NO: 34832 - DNA, 15 bp, Homo sapiens
tgacttttatttact

SEQ ID NO: 34833 - DNA, 15 bp, Homo sapiens
gacttttatttactt

SEQ ID NO: 34834 - DNA, 15 bp, Homo sapiens
acttttatttacttc

SEQ ID NO: 34835 - DNA, 15 bp, Homo sapiens
cttttatttacttca

SEQ ID NO: 34836 - DNA, 15 bp, Homo sapiens
ttttatttacttcag

SEQ ID NO: 34837 - DNA, 15 bp, Homo sapiens
tttatttacttcagt

SEQ ID NO: 34838 - DNA, 15 bp, Homo sapiens
ttatttacttcagtt

SEQ ID NO: 34839 - DNA, 15 bp, Homo sapiens
tatttacttcagttc

SEQ ID NO: 34840 - DNA, 15 bp, Homo sapiens
atttacttcagttct

SEQ ID NO: 34841 - DNA, 15 bp, Homo sapiens
tttacttcagttctt

SEQ ID NO: 34842 - DNA, 15 bp, Homo sapiens
ttacttcagttcttt

SEQ ID NO: 34843 - DNA, 15 bp, Homo sapiens
tacttcagttctttc

SEQ ID NO: 34844 - DNA, 15 bp, Homo sapiens
acttcagttctttca

SEQ ID NO: 34845 - DNA, 15 bp, Homo sapiens
cttcagttctttcat

SEQ ID NO: 34846 - DNA, 15 bp, Homo sapiens
ttcagttctttcatc

SEQ ID NO: 34847 - DNA, 15 bp, Homo sapiens
tcagttctttcatct

SEQ ID NO: 34848 - DNA, 15 bp, Homo sapiens
cagttctttcatctt

SEQ ID NO: 34849 - DNA, 15 bp, Homo sapiens
agttctttcatcttt

SEQ ID NO: 34850 - DNA, 15 bp, Homo sapiens
gttctttcatctttt

SEQ ID NO: 34851 - DNA, 15 bp, Homo sapiens
ttctttcatcttttg

SEQ ID NO: 34852 - DNA, 15 bp, Homo sapiens
tctttcatcttttgt

SEQ ID NO: 34853 - DNA, 15 bp, Homo sapiens
ctttcatcttttgtt

SEQ ID NO: 34854 - DNA, 15 bp, Homo sapiens
tttcatcttttgttt

SEQ ID NO: 34855 - DNA, 15 bp, Homo sapiens
ttcatcttttgtttc

SEQ ID NO: 34856 - DNA, 15 bp, Homo sapiens
tcatcttttgtttcc

SEQ ID NO: 34857 - DNA, 15 bp, Homo sapiens
catcttttgtttccc

SEQ ID NO: 34858 - DNA, 15 bp, Homo sapiens
atcttttgtttcccc

SEQ ID NO: 34859 - DNA, 15 bp, Homo sapiens
tcttttgtttccccc

SEQ ID NO: 34860 - DNA, 15 bp, Homo sapiens
cttttgtttcccccc

SEQ ID NO: 34861 - DNA, 15 bp, Homo sapiens
ttttgtttccccccg

SEQ ID NO: 34862 - DNA, 15 bp, Homo sapiens
tttgtttccccccga

SEQ ID NO: 34863 - DNA, 15 bp, Homo sapiens
ttgtttccccccgag

SEQ ID NO: 34864 - DNA, 15 bp, Homo sapiens
tgtttccccccgaga

SEQ ID NO: 34865 - DNA, 15 bp, Homo sapiens
gtttccccccgagat

SEQ ID NO: 34866 - DNA, 15 bp, Homo sapiens
tttccccccgagatg

SEQ ID NO: 34867 - DNA, 15 bp, Homo sapiens
ttccccccgagatgg

SEQ ID NO: 34868 - DNA, 15 bp, Homo sapiens
tccccccgagatgga

SEQ ID NO: 34869 - DNA, 15 bp, Homo sapiens
ccccccgagatggag

SEQ ID NO: 34870 - DNA, 15 bp, Homo sapiens
cccccgagatggagt

SEQ ID NO: 34871 - DNA, 15 bp, Homo sapiens
ccccgagatggagtc

SEQ ID NO: 34872 - DNA, 15 bp, Homo sapiens
cccgagatggagtct

SEQ ID NO: 34873 - DNA, 15 bp, Homo sapiens
ccgagatggagtctc

SEQ ID NO: 34874 - DNA, 15 bp, Homo sapiens
cgagatggagtctcg

SEQ ID NO: 34875 - DNA, 15 bp, Homo sapiens
gagatggagtctcgc

SEQ ID NO: 34876 - DNA, 15 bp, Homo sapiens
agatggagtctcgct

SEQ ID NO: 34877 - DNA, 15 bp, Homo sapiens
gatggagtctcgctc

SEQ ID NO: 34878 - DNA, 15 bp, Homo sapiens
atggagtctcgctct

SEQ ID NO: 34879 - DNA, 15 bp, Homo sapiens
tggagtctcgctctg

SEQ ID NO: 34880 - DNA, 15 bp, Homo sapiens
ggagtctcgctctgt

SEQ ID NO: 34881 - DNA, 15 bp, Homo sapiens
gagtctcgctctgtc

SEQ ID NO: 34882 - DNA, 15 bp, Homo sapiens
agtctcgctctgtcg

SEQ ID NO: 34883 - DNA, 15 bp, Homo sapiens
gtctcgctctgtcgc

SEQ ID NO: 34884 - DNA, 15 bp, Homo sapiens
tctcgctctgtcgca

SEQ ID NO: 34885 - DNA, 15 bp, Homo sapiens
ctcgctctgtcgcac

SEQ ID NO: 34886 - DNA, 15 bp, Homo sapiens
tcgctctgtcgcaca

SEQ ID NO: 34887 - DNA, 15 bp, Homo sapiens
cgctctgtcgcacag

SEQ ID NO: 34888 - DNA, 15 bp, Homo sapiens
gctctgtcgcacagg

SEQ ID NO: 34889 - DNA, 15 bp, Homo sapiens
ctctgtcgcacaggc

SEQ ID NO: 34890 - DNA, 15 bp, Homo sapiens
tctgtcgcacaggct

SEQ ID NO: 34891 - DNA, 15 bp, Homo sapiens
ctgtcgcacaggctg

SEQ ID NO: 34892 - DNA, 15 bp, Homo sapiens
tgtcgcacaggctgg

SEQ ID NO: 34893 - DNA, 15 bp, Homo sapiens
gtcgcacaggctgga

SEQ ID NO: 34894 - DNA, 15 bp, Homo sapiens
tcgcacaggctggag

SEQ ID NO: 34895 - DNA, 15 bp, Homo sapiens
cgcacaggctggagt

SEQ ID NO: 34896 - DNA, 15 bp, Homo sapiens
gcacaggctggagtg

SEQ ID NO: 34897 - DNA, 15 bp, Homo sapiens
cacaggctggagtgc

SEQ ID NO: 34898 - DNA, 15 bp, Homo sapiens
acaggctggagtgca

SEQ ID NO: 34899 - DNA, 15 bp, Homo sapiens
ggagtgcagtggcgt

SEQ ID NO: 34900 - DNA, 15 bp, Homo sapiens
gagtgcagtggcgtg

SEQ ID NO: 34901 - DNA, 15 bp, Homo sapiens
agtgcagtggcgtga

SEQ ID NO: 34902 - DNA, 15 bp, Homo sapiens
gtgcagtggcgtgat

SEQ ID NO: 34903 - DNA, 15 bp, Homo sapiens
tgcagtggcgtgatc

SEQ ID NO: 34904 - DNA, 15 bp, Homo sapiens
gcagtggcgtgatct

SEQ ID NO: 34905 - DNA, 15 bp, Homo sapiens
cagtggcgtgatctt

SEQ ID NO: 34906 - DNA, 15 bp, Homo sapiens
agtggcgtgatcttg

SEQ ID NO: 34907 - DNA, 15 bp, Homo sapiens
gtggcgtgatcttgg

SEQ ID NO: 34908 - DNA, 15 bp, Homo sapiens
tggcgtgatcttggc

SEQ ID NO: 34909 - DNA, 15 bp, Homo sapiens
ggcgtgatcttggct

SEQ ID NO: 34910 - DNA, 15 bp, Homo sapiens
gcgtgatcttggctc

SEQ ID NO: 34911 - DNA, 15 bp, Homo sapiens
cgtgatcttggctca

SEQ ID NO: 34912 - DNA, 15 bp, Homo sapiens
gtgatcttggctcac

SEQ ID NO: 34913 - DNA, 15 bp, Homo sapiens
tgatcttggctcact

SEQ ID NO: 34914 - DNA, 15 bp, Homo sapiens
gatcttggctcactg

SEQ ID NO: 34915 - DNA, 15 bp, Homo sapiens
atcttggctcactgc

SEQ ID NO: 34916 - DNA, 15 bp, Homo sapiens
tcttggctcactgca

SEQ ID NO: 34917 - DNA, 15 bp, Homo sapiens
cttggctcactgcaa

SEQ ID NO: 34918 - DNA, 15 bp, Homo sapiens
ttggctcactgcaag

SEQ ID NO: 34919 - DNA, 15 bp, Homo sapiens
tggctcactgcaagc

SEQ ID NO: 34920 - DNA, 15 bp, Homo sapiens
ggctcactgcaagct

SEQ ID NO: 34921 - DNA, 15 bp, Homo sapiens
gctcactgcaagctc

SEQ ID NO: 34922 - DNA, 15 bp, Homo sapiens
ctcactgcaagctcc

SEQ ID NO: 34923 - DNA, 15 bp, Homo sapiens
tcactgcaagctcca

SEQ ID NO: 34924 - DNA, 15 bp, Homo sapiens
cactgcaagctccac

SEQ ID NO: 34925 - DNA, 15 bp, Homo sapiens
actgcaagctccacc

SEQ ID NO: 34926 - DNA, 15 bp, Homo sapiens
ctgcaagctccacct

SEQ ID NO: 34927 - DNA, 15 bp, Homo sapiens
tgcaagctccacctc

SEQ ID NO: 34928 - DNA, 15 bp, Homo sapiens
gcaagctccacctcc

SEQ ID NO: 34929 - DNA, 15 bp, Homo sapiens
caagctccacctcct

SEQ ID NO: 34930 - DNA, 15 bp, Homo sapiens
aagctccacctcctg

SEQ ID NO: 34931 - DNA, 15 bp, Homo sapiens
agctccacctcctgg

SEQ ID NO: 34932 - DNA, 15 bp, Homo sapiens
gctccacctcctggc

SEQ ID NO: 34933 - DNA, 15 bp, Homo sapiens
ctccacctcctggct

SEQ ID NO: 34934 - DNA, 15 bp, Homo sapiens
tccacctcctggctt

SEQ ID NO: 34935 - DNA, 15 bp, Homo sapiens
ccacctcctggcttc

SEQ ID NO: 34936 - DNA, 15 bp, Homo sapiens
cacctcctggcttca

SEQ ID NO: 34937 - DNA, 15 bp, Homo sapiens
acctcctggcttcac

SEQ ID NO: 34938 - DNA, 15 bp, Homo sapiens
cctcctggcttcacg

SEQ ID NO: 34939 - DNA, 15 bp, Homo sapiens
ctcctggcttcacgc

SEQ ID NO: 34940 - DNA, 15 bp, Homo sapiens
tcctggcttcacgcc

SEQ ID NO: 34941 - DNA, 15 bp, Homo sapiens
cctggcttcacgcca

SEQ ID NO: 34942 - DNA, 15 bp, Homo sapiens
ctggcttcacgccat

SEQ ID NO: 34943 - DNA, 15 bp, Homo sapiens
tggcttcacgccatt

SEQ ID NO: 34944 - DNA, 15 bp, Homo sapiens
ggcttcacgccattc

SEQ ID NO: 34945 - DNA, 15 bp, Homo sapiens
gcttcacgccattct

SEQ ID NO: 34946 - DNA, 15 bp, Homo sapiens
cttcacgccattctc

SEQ ID NO: 34947 - DNA, 15 bp, Homo sapiens
ttcacgccattctcc

SEQ ID NO: 34948 - DNA, 15 bp, Homo sapiens
tcacgccattctcct

SEQ ID NO: 34949 - DNA, 15 bp, Homo sapiens
cacgccattctcctg

SEQ ID NO: 34950 - DNA, 15 bp, Homo sapiens
acgccattctcctgc

SEQ ID NO: 34951 - DNA, 15 bp, Homo sapiens
cgccattctcctgcc

SEQ ID NO: 34952 - DNA, 15 bp, Homo sapiens
gccattctcctgcct

SEQ ID NO: 34953 - DNA, 15 bp, Homo sapiens
ccattctcctgcctc

SEQ ID NO: 34954 - DNA, 15 bp, Homo sapiens
cattctcctgcctca

SEQ ID NO: 34955 - DNA, 15 bp, Homo sapiens
attctcctgcctcag

SEQ ID NO: 34956 - DNA, 15 bp, Homo sapiens
ttctcctgcctcagc

SEQ ID NO: 34957 - DNA, 15 bp, Homo sapiens
tctcctgcctcagcc

SEQ ID NO: 34958 - DNA, 15 bp, Homo sapiens
ctcctgcctcagcct

SEQ ID NO: 34959 - DNA, 15 bp, Homo sapiens
tcctgcctcagcctc

SEQ ID NO: 34960 - DNA, 15 bp, Homo sapiens
cctgcctcagcctcc

SEQ ID NO: 34961 - DNA, 15 bp, Homo sapiens
ctgcctcagcctcct

SEQ ID NO: 34962 - DNA, 15 bp, Homo sapiens
tgcctcagcctcctg

SEQ ID NO: 34963 - DNA, 15 bp, Homo sapiens
gcctcagcctcctga

SEQ ID NO: 34964 - DNA, 15 bp, Homo sapiens
cctcagcctcctgag

SEQ ID NO: 34965 - DNA, 15 bp, Homo sapiens
ctcagcctcctgagt

SEQ ID NO: 34966 - DNA, 15 bp, Homo sapiens
tcagcctcctgagta

SEQ ID NO: 34967 - DNA, 15 bp, Homo sapiens
cagcctcctgagtag

SEQ ID NO: 34968 - DNA, 15 bp, Homo sapiens
agcctcctgagtagc

SEQ ID NO: 34969 - DNA, 15 bp, Homo sapiens
gcctcctgagtagct

SEQ ID NO: 34970 - DNA, 15 bp, Homo sapiens
cctcctgagtagctg

SEQ ID NO: 34971 - DNA, 15 bp, Homo sapiens
ctcctgagtagctga

SEQ ID NO: 34972 - DNA, 15 bp, Homo sapiens
tcctgagtagctgag

SEQ ID NO: 34973 - DNA, 15 bp, Homo sapiens
cctgagtagctgaga

SEQ ID NO: 34974 - DNA, 15 bp, Homo sapiens
ctgagtagctgagac

SEQ ID NO: 34975 - DNA, 15 bp, Homo sapiens
tgagtagctgagact

SEQ ID NO: 34976 - DNA, 15 bp, Homo sapiens
gagtagctgagacta

SEQ ID NO: 34977 - DNA, 15 bp, Homo sapiens
agtagctgagactac

SEQ ID NO: 34978 - DNA, 15 bp, Homo sapiens
gtagctgagactaca

SEQ ID NO: 34979 - DNA, 15 bp, Homo sapiens
tagctgagactacag

SEQ ID NO: 34980 - DNA, 15 bp, Homo sapiens
agctgagactacagg

SEQ ID NO: 34981 - DNA, 15 bp, Homo sapiens
gctgagactacaggc

SEQ ID NO: 34982 - DNA, 15 bp, Homo sapiens
ctgagactacaggcg

SEQ ID NO: 34983 - DNA, 15 bp, Homo sapiens
tgagactacaggcgc

SEQ ID NO: 34984 - DNA, 15 bp, Homo sapiens
gagactacaggcgcc

SEQ ID NO: 34985 - DNA, 15 bp, Homo sapiens
agactacaggcgcct

SEQ ID NO: 34986 - DNA, 15 bp, Homo sapiens
gactacaggcgcctg

SEQ ID NO: 34987 - DNA, 15 bp, Homo sapiens
actacaggcgcctgc

SEQ ID NO: 34988 - DNA, 15 bp, Homo sapiens
ctacaggcgcctgcc

SEQ ID NO: 34989 - DNA, 15 bp, Homo sapiens
tacaggcgcctgcca

SEQ ID NO: 34990 - DNA, 15 bp, Homo sapiens
acaggcgcctgccac

SEQ ID NO: 34991 - DNA, 15 bp, Homo sapiens
caggcgcctgccacc

SEQ ID NO: 34992 - DNA, 15 bp, Homo sapiens
aggcgcctgccacca

SEQ ID NO: 34993 - DNA, 15 bp, Homo sapiens
ggcgcctgccaccac

SEQ ID NO: 34994 - DNA, 15 bp, Homo sapiens
gcgcctgccaccacg

SEQ ID NO: 34995 - DNA, 15 bp, Homo sapiens
cgcctgccaccacgc

SEQ ID NO: 34996 - DNA, 15 bp, Homo sapiens
gcctgccaccacgcc

SEQ ID NO: 34997 - DNA, 15 bp, Homo sapiens
cctgccaccacgccc

SEQ ID NO: 34998 - DNA, 15 bp, Homo sapiens
ctgccaccacgcccg

SEQ ID NO: 34999 - DNA, 15 bp, Homo sapiens
tgccaccacgcccgg

SEQ ID NO: 35000 - DNA, 15 bp, Homo sapiens
gccaccacgcccggc

SEQ ID NO: 35001 - DNA, 15 bp, Homo sapiens
ccaccacgcccggct

SEQ ID NO: 35002 - DNA, 15 bp, Homo sapiens
caccacgcccggcta

SEQ ID NO: 35003 - DNA, 15 bp, Homo sapiens
accacgcccggctaa

SEQ ID NO: 35004 - DNA, 15 bp, Homo sapiens
ccacgcccggctaat

SEQ ID NO: 35005 - DNA, 15 bp, Homo sapiens
cacgcccggctaatt

SEQ ID NO: 35006 - DNA, 15 bp, Homo sapiens
acgcccggctaattt

SEQ ID NO: 35007 - DNA, 15 bp, Homo sapiens
cgcccggctaatttt

SEQ ID NO: 35008 - DNA, 15 bp, Homo sapiens
gcccggctaattttt

SEQ ID NO: 35009 - DNA, 15 bp, Homo sapiens
cccggctaatttttt

SEQ ID NO: 35010 - DNA, 15 bp, Homo sapiens
ccggctaattttttt

SEQ ID NO: 35011 - DNA, 15 bp, Homo sapiens
cggctaatttttttg

SEQ ID NO: 35012 - DNA, 15 bp, Homo sapiens
ggctaatttttttgt

SEQ ID NO: 35013 - DNA, 15 bp, Homo sapiens
gctaatttttttgta

SEQ ID NO: 35014 - DNA, 15 bp, Homo sapiens
ctaatttttttgtat

SEQ ID NO: 35015 - DNA, 15 bp, Homo sapiens
taatttttttgtatt

SEQ ID NO: 35016 - DNA, 15 bp, Homo sapiens
aatttttttgtattt

SEQ ID NO: 35017 - DNA, 15 bp, Homo sapiens
atttttttgtatttt

SEQ ID NO: 35018 - DNA, 15 bp, Homo sapiens
tttttttgtattttt

SEQ ID NO: 35019 - DNA, 15 bp, Homo sapiens
ttttttgtatttttt

SEQ ID NO: 35020 - DNA, 15 bp, Homo sapiens
tttgtattttttttt

SEQ ID NO: 35021 - DNA, 15 bp, Homo sapiens
ttgtattttttttta

SEQ ID NO: 35022 - DNA, 15 bp, Homo sapiens
tgtatttttttttag

SEQ ID NO: 35023 - DNA, 15 bp, Homo sapiens
gtatttttttttagt

SEQ ID NO: 35024 - DNA, 15 bp, Homo sapiens
tatttttttttagta

SEQ ID NO: 35025 - DNA, 15 bp, Homo sapiens
atttttttttagtag

SEQ ID NO: 35026 - DNA, 15 bp, Homo sapiens
tttttttttagtaga

SEQ ID NO: 35027 - DNA, 15 bp, Homo sapiens
tttttttagtagaga

SEQ ID NO: 35028 - DNA, 15 bp, Homo sapiens
ttttttagtagagat

SEQ ID NO: 35029 - DNA, 15 bp, Homo sapiens
tttttagtagagatg

SEQ ID NO: 35030 - DNA, 15 bp, Homo sapiens
ttttagtagagatgg

SEQ ID NO: 35031 - DNA, 15 bp, Homo sapiens
tttagtagagatggg

SEQ ID NO: 35032 - DNA, 15 bp, Homo sapiens
ttagtagagatgggg

SEQ ID NO: 35033 - DNA, 15 bp, Homo sapiens
tagtagagatggggt

SEQ ID NO: 35034 - DNA, 15 bp, Homo sapiens
agtagagatggggtt

SEQ ID NO: 35035 - DNA, 15 bp, Homo sapiens
gtagagatggggttt

SEQ ID NO: 35036 - DNA, 15 bp, Homo sapiens
tagagatggggtttc

SEQ ID NO: 35037 - DNA, 15 bp, Homo sapiens
agagatggggtttca

SEQ ID NO: 35038 - DNA, 15 bp, Homo sapiens
gagatggggtttcac

SEQ ID NO: 35039 - DNA, 15 bp, Homo sapiens
agatggggtttcacc

SEQ ID NO: 35040 - DNA, 15 bp, Homo sapiens
gatggggtttcacca

SEQ ID NO: 35041 - DNA, 15 bp, Homo sapiens
atggggtttcaccac

SEQ ID NO: 35042 - DNA, 15 bp, Homo sapiens
tggggtttcaccaca

SEQ ID NO: 35043 - DNA, 15 bp, Homo sapiens
ggggtttcaccacat

SEQ ID NO: 35044 - DNA, 15 bp, Homo sapiens
gggtttcaccacatt

SEQ ID NO: 35045 - DNA, 15 bp, Homo sapiens
ggtttcaccacatta

SEQ ID NO: 35046 - DNA, 15 bp, Homo sapiens
gtttcaccacattag

SEQ ID NO: 35047 - DNA, 15 bp, Homo sapiens
tttcaccacattagc

SEQ ID NO: 35048 - DNA, 15 bp, Homo sapiens
ttcaccacattagcc

SEQ ID NO: 35049 - DNA, 15 bp, Homo sapiens
tcaccacattagcca

SEQ ID NO: 35050 - DNA, 15 bp, Homo sapiens
caccacattagccag

SEQ ID NO: 35051 - DNA, 15 bp, Homo sapiens
accacattagccagg

SEQ ID NO: 35052 - DNA, 15 bp, Homo sapiens
ccacattagccagga

SEQ ID NO: 35053 - DNA, 15 bp, Homo sapiens
cacattagccaggat

SEQ ID NO: 35054 - DNA, 15 bp, Homo sapiens
acattagccaggatg

SEQ ID NO: 35055 - DNA, 15 bp, Homo sapiens
cattagccaggatgg

SEQ ID NO: 35056 - DNA, 15 bp, Homo sapiens
attagccaggatggt

SEQ ID NO: 35057 - DNA, 15 bp, Homo sapiens
ttagccaggatggtc

SEQ ID NO: 35058 - DNA, 15 bp, Homo sapiens
tagccaggatggtct

SEQ ID NO: 35059 - DNA, 15 bp, Homo sapiens
agccaggatggtctc

SEQ ID NO: 35060 - DNA, 15 bp, Homo sapiens
gccaggatggtctcg

SEQ ID NO: 35061 - DNA, 15 bp, Homo sapiens
ccaggatggtctcga

SEQ ID NO: 35062 - DNA, 15 bp, Homo sapiens
caggatggtctcgat

SEQ ID NO: 35063 - DNA, 15 bp, Homo sapiens
aggatggtctcgatc

SEQ ID NO: 35064 - DNA, 15 bp, Homo sapiens
ggatggtctcgatct

SEQ ID NO: 35065 - DNA, 15 bp, Homo sapiens
gatggtctcgatctc

SEQ ID NO: 35066 - DNA, 15 bp, Homo sapiens
atggtctcgatctcc

SEQ ID NO: 35067 - DNA, 15 bp, Homo sapiens
tggtctcgatctcct

SEQ ID NO: 35068 - DNA, 15 bp, Homo sapiens
ggtctcgatctcctg

SEQ ID NO: 35069 - DNA, 15 bp, Homo sapiens
gtctcgatctcctga

SEQ ID NO: 35070 - DNA, 15 bp, Homo sapiens
tctcgatctcctgac

SEQ ID NO: 35071 - DNA, 15 bp, Homo sapiens
ctcgatctcctgacc

SEQ ID NO: 35072 - DNA, 15 bp, Homo sapiens
tcgatctcctgacct

SEQ ID NO: 35073 - DNA, 15 bp, Homo sapiens
cgatctcctgacctc

SEQ ID NO: 35074 - DNA, 15 bp, Homo sapiens
gatctcctgacctcg

SEQ ID NO: 35075 - DNA, 15 bp, Homo sapiens
atctcctgacctcgt

SEQ ID NO: 35076 - DNA, 15 bp, Homo sapiens
tctcctgacctcgtg

SEQ ID NO: 35077 - DNA, 15 bp, Homo sapiens
ctcctgacctcgtga

SEQ ID NO: 35078 - DNA, 15 bp, Homo sapiens
tcctgacctcgtgat

SEQ ID NO: 35079 - DNA, 15 bp, Homo sapiens
cctgacctcgtgatc

SEQ ID NO: 35080 - DNA, 15 bp, Homo sapiens
ctgacctcgtgatcc

SEQ ID NO: 35081 - DNA, 15 bp, Homo sapiens
tgacctcgtgatccg

SEQ ID NO: 35082 - DNA, 15 bp, Homo sapiens
gacctcgtgatccgc

SEQ ID NO: 35083 - DNA, 15 bp, Homo sapiens
acctcgtgatccgcc

SEQ ID NO: 35084 - DNA, 15 bp, Homo sapiens
cctcgtgatccgccc

SEQ ID NO: 35085 - DNA, 15 bp, Homo sapiens
ctcgtgatccgcccg

SEQ ID NO: 35086 - DNA, 15 bp, Homo sapiens
tcgtgatccgcccgc

SEQ ID NO: 35087 - DNA, 15 bp, Homo sapiens
cgtgatccgcccgcc

SEQ ID NO: 35088 - DNA, 15 bp, Homo sapiens
gtgatccgcccgcct

SEQ ID NO: 35089 - DNA, 15 bp, Homo sapiens
tgatccgcccgcctt

SEQ ID NO: 35090 - DNA, 15 bp, Homo sapiens
gatccgcccgccttg

SEQ ID NO: 35091 - DNA, 15 bp, Homo sapiens
atccgcccgccttgg

SEQ ID NO: 35092 - DNA, 15 bp, Homo sapiens
tccgcccgccttggc

SEQ ID NO: 35093 - DNA, 15 bp, Homo sapiens
ccgcccgccttggcc

SEQ ID NO: 35094 - DNA, 15 bp, Homo sapiens
cgcccgccttggcct

SEQ ID NO: 35095 - DNA, 15 bp, Homo sapiens
gcccgccttggcctc

SEQ ID NO: 35096 - DNA, 15 bp, Homo sapiens
cccgccttggcctcc

SEQ ID NO: 35097 - DNA, 15 bp, Homo sapiens
ccgccttggcctccc

SEQ ID NO: 35098 - DNA, 15 bp, Homo sapiens
cgccttggcctccca

SEQ ID NO: 35099 - DNA, 15 bp, Homo sapiens
gccttggcctcccaa

SEQ ID NO: 35100 - DNA, 15 bp, Homo sapiens
ccttggcctcccaaa

SEQ ID NO: 35101 - DNA, 15 bp, Homo sapiens
cttggcctcccaaag

SEQ ID NO: 35102 - DNA, 15 bp, Homo sapiens
ttggcctcccaaagt

SEQ ID NO: 35103 - DNA, 15 bp, Homo sapiens
tggcctcccaaagtg

SEQ ID NO: 35104 - DNA, 15 bp, Homo sapiens
ggcctcccaaagtgc

SEQ ID NO: 35105 - DNA, 15 bp, Homo sapiens
gcctcccaaagtgct

SEQ ID NO: 35106 - DNA, 15 bp, Homo sapiens
cctcccaaagtgctg

SEQ ID NO: 35107 - DNA, 15 bp, Homo sapiens
ctcccaaagtgctgg

SEQ ID NO: 35108 - DNA, 15 bp, Homo sapiens
ctgggattacaggcg

SEQ ID NO: 35109 - DNA, 15 bp, Homo sapiens
tgggattacaggcgt

SEQ ID NO: 35110 - DNA, 15 bp, Homo sapiens
gggattacaggcgtg

SEQ ID NO: 35111 - DNA, 15 bp, Homo sapiens
aggcgtgagccactg

SEQ ID NO: 35112 - DNA, 15 bp, Homo sapiens
ggcgtgagccactgc

SEQ ID NO: 35113 - DNA, 15 bp, Homo sapiens
gcgtgagccactgcg

SEQ ID NO: 35114 - DNA, 15 bp, Homo sapiens
cgtgagccactgcgc

SEQ ID NO: 35115 - DNA, 15 bp, Homo sapiens
gtgagccactgcgcc

SEQ ID NO: 35116 - DNA, 15 bp, Homo sapiens
tgagccactgcgcct

SEQ ID NO: 35117 - DNA, 15 bp, Homo sapiens
gagccactgcgcctg

SEQ ID NO: 35118 - DNA, 15 bp, Homo sapiens
agccactgcgcctgg

SEQ ID NO: 35119 - DNA, 15 bp, Homo sapiens
gccactgcgcctggc

SEQ ID NO: 35120 - DNA, 15 bp, Homo sapiens
ccactgcgcctggcc

SEQ ID NO: 35121 - DNA, 15 bp, Homo sapiens
cactgcgcctggcct

SEQ ID NO: 35122 - DNA, 15 bp, Homo sapiens
actgcgcctggcctc

SEQ ID NO: 35123 - DNA, 15 bp, Homo sapiens
ctgcgcctggcctct

SEQ ID NO: 35124 - DNA, 15 bp, Homo sapiens
tgcgcctggcctctt

SEQ ID NO: 35125 - DNA, 15 bp, Homo sapiens
gcgcctggcctcttt

SEQ ID NO: 35126 - DNA, 15 bp, Homo sapiens
cgcctggcctctttt

SEQ ID NO: 35127 - DNA, 15 bp, Homo sapiens
gcctggcctcttttg

SEQ ID NO: 35128 - DNA, 15 bp, Homo sapiens
cctggcctcttttgt

SEQ ID NO: 35129 - DNA, 15 bp, Homo sapiens
ctggcctcttttgtc

SEQ ID NO: 35130 - DNA, 15 bp, Homo sapiens
tggcctcttttgtct

SEQ ID NO: 35131 - DNA, 15 bp, Homo sapiens
ggcctcttttgtctc

SEQ ID NO: 35132 - DNA, 15 bp, Homo sapiens
gcctcttttgtctct

SEQ ID NO: 35133 - DNA, 15 bp, Homo sapiens
cctcttttgtctctt

SEQ ID NO: 35134 - DNA, 15 bp, Homo sapiens
ctcttttgtctcttt

SEQ ID NO: 35135 - DNA, 15 bp, Homo sapiens
tcttttgtctctttt

SEQ ID NO: 35136 - DNA, 15 bp, Homo sapiens
cttttgtctcttttt

SEQ ID NO: 35137 - DNA, 15 bp, Homo sapiens
ttttgtctcttttta

SEQ ID NO: 35138 - DNA, 15 bp, Homo sapiens
tttgtctctttttaa

SEQ ID NO: 35139 - DNA, 15 bp, Homo sapiens
ttgtctctttttaaa

SEQ ID NO: 35140 - DNA, 15 bp, Homo sapiens
tgtctctttttaaaa

SEQ ID NO: 35141 - DNA, 15 bp, Homo sapiens
gtctctttttaaaaa

SEQ ID NO: 35142 - DNA, 15 bp, Homo sapiens
tctctttttaaaaac

SEQ ID NO: 35143 - DNA, 15 bp, Homo sapiens
ctctttttaaaaact

SEQ ID NO: 35144 - DNA, 15 bp, Homo sapiens
tctttttaaaaacta

SEQ ID NO: 35145 - DNA, 15 bp, Homo sapiens
ctttttaaaaactac

SEQ ID NO: 35146 - DNA, 15 bp, Homo sapiens
tttttaaaaactact

SEQ ID NO: 35147 - DNA, 15 bp, Homo sapiens
ttttaaaaactactt

SEQ ID NO: 35148 - DNA, 15 bp, Homo sapiens
tttaaaaactacttt

SEQ ID NO: 35149 - DNA, 15 bp, Homo sapiens
ttaaaaactactttt

SEQ ID NO: 35150 - DNA, 15 bp, Homo sapiens
taaaaactacttttg

SEQ ID NO: 35151 - DNA, 15 bp, Homo sapiens
aaaaactacttttga

SEQ ID NO: 35152 - DNA, 15 bp, Homo sapiens
aaaactacttttgag

SEQ ID NO: 35153 - DNA, 15 bp, Homo sapiens
aaactacttttgagc

SEQ ID NO: 35154 - DNA, 15 bp, Homo sapiens
aactacttttgagca

SEQ ID NO: 35155 - DNA, 15 bp, Homo sapiens
actacttttgagcac

SEQ ID NO: 35156 - DNA, 15 bp, Homo sapiens
ctacttttgagcacg

SEQ ID NO: 35157 - DNA, 15 bp, Homo sapiens
tacttttgagcacgt

SEQ ID NO: 35158 - DNA, 15 bp, Homo sapiens
acttttgagcacgta

SEQ ID NO: 35159 - DNA, 15 bp, Homo sapiens
cttttgagcacgtat

SEQ ID NO: 35160 - DNA, 15 bp, Homo sapiens
ttttgagcacgtatt

SEQ ID NO: 35161 - DNA, 15 bp, Homo sapiens
tttgagcacgtattt

SEQ ID NO: 35162 - DNA, 15 bp, Homo sapiens
ttgagcacgtatttt

SEQ ID NO: 35163 - DNA, 15 bp, Homo sapiens
tgagcacgtattttt

SEQ ID NO: 35164 - DNA, 15 bp, Homo sapiens
gagcacgtatttttg

SEQ ID NO: 35165 - DNA, 15 bp, Homo sapiens
agcacgtatttttga

SEQ ID NO: 35166 - DNA, 15 bp, Homo sapiens
gcacgtatttttgac

SEQ ID NO: 35167 - DNA, 15 bp, Homo sapiens
cacgtatttttgacg

SEQ ID NO: 35168 - DNA, 15 bp, Homo sapiens
acgtatttttgacgt

SEQ ID NO: 35169 - DNA, 15 bp, Homo sapiens
cgtatttttgacgtc

SEQ ID NO: 35170 - DNA, 15 bp, Homo sapiens
gtatttttgacgtct

SEQ ID NO: 35171 - DNA, 15 bp, Homo sapiens
tatttttgacgtctg

SEQ ID NO: 35172 - DNA, 15 bp, Homo sapiens
atttttgacgtctga

SEQ ID NO: 35173 - DNA, 15 bp, Homo sapiens
tttttgacgtctgaa

SEQ ID NO: 35174 - DNA, 15 bp, Homo sapiens
ttttgacgtctgaat

SEQ ID NO: 35175 - DNA, 15 bp, Homo sapiens
tttgacgtctgaatg

SEQ ID NO: 35176 - DNA, 15 bp, Homo sapiens
ttgacgtctgaatgc

SEQ ID NO: 35177 - DNA, 15 bp, Homo sapiens
tgacgtctgaatgct

SEQ ID NO: 35178 - DNA, 15 bp, Homo sapiens
gacgtctgaatgctc

SEQ ID NO: 35179 - DNA, 15 bp, Homo sapiens
acgtctgaatgctca

SEQ ID NO: 35180 - DNA, 15 bp, Homo sapiens
cgtctgaatgctcac

SEQ ID NO: 35181 - DNA, 15 bp, Homo sapiens
gtctgaatgctcaca

SEQ ID NO: 35182 - DNA, 15 bp, Homo sapiens
tctgaatgctcacaa

SEQ ID NO: 35183 - DNA, 15 bp, Homo sapiens
ctgaatgctcacaaa

SEQ ID NO: 35184 - DNA, 15 bp, Homo sapiens
tgaatgctcacaaat

SEQ ID NO: 35185 - DNA, 15 bp, Homo sapiens
gaatgctcacaaatt

SEQ ID NO: 35186 - DNA, 15 bp, Homo sapiens
aatgctcacaaattc

SEQ ID NO: 35187 - DNA, 15 bp, Homo sapiens
atgctcacaaattca

SEQ ID NO: 35188 - DNA, 15 bp, Homo sapiens
tgctcacaaattcac

SEQ ID NO: 35189 - DNA, 15 bp, Homo sapiens
gctcacaaattcact

SEQ ID NO: 35190 - DNA, 15 bp, Homo sapiens
ctcacaaattcactg

SEQ ID NO: 35191 - DNA, 15 bp, Homo sapiens
tcacaaattcactgg

SEQ ID NO: 35192 - DNA, 15 bp, Homo sapiens
cacaaattcactggt

SEQ ID NO: 35193 - DNA, 15 bp, Homo sapiens
acaaattcactggtg

SEQ ID NO: 35194 - DNA, 15 bp, Homo sapiens
caaattcactggtga

SEQ ID NO: 35195 - DNA, 15 bp, Homo sapiens
aaattcactggtgat

SEQ ID NO: 35196 - DNA, 15 bp, Homo sapiens
aattcactggtgatt

SEQ ID NO: 35197 - DNA, 15 bp, Homo sapiens
attcactggtgattc

SEQ ID NO: 35198 - DNA, 15 bp, Homo sapiens
ttcactggtgattct

SEQ ID NO: 35199 - DNA, 15 bp, Homo sapiens
tcactggtgattctg

SEQ ID NO: 35200 - DNA, 15 bp, Homo sapiens
cactggtgattctga

SEQ ID NO: 35201 - DNA, 15 bp, Homo sapiens
actggtgattctgag

SEQ ID NO: 35202 - DNA, 15 bp, Homo sapiens
ctggtgattctgaga

SEQ ID NO: 35203 - DNA, 15 bp, Homo sapiens
tggtgattctgagaa

SEQ ID NO: 35204 - DNA, 15 bp, Homo sapiens
ggtgattctgagaag

SEQ ID NO: 35205 - DNA, 15 bp, Homo sapiens
gtgattctgagaagg

SEQ ID NO: 35206 - DNA, 15 bp, Homo sapiens
tgattctgagaaggt

SEQ ID NO: 35207 - DNA, 15 bp, Homo sapiens
gattctgagaaggta

SEQ ID NO: 35208 - DNA, 15 bp, Homo sapiens
attctgagaaggtaa

SEQ ID NO: 35209 - DNA, 15 bp, Homo sapiens
ttctgagaaggtaag

SEQ ID NO: 35210 - DNA, 15 bp, Homo sapiens
tctgagaaggtaagc

SEQ ID NO: 35211 - DNA, 15 bp, Homo sapiens
ctgagaaggtaagct

SEQ ID NO: 35212 - DNA, 15 bp, Homo sapiens
tgagaaggtaagcta

SEQ ID NO: 35213 - DNA, 15 bp, Homo sapiens
gagaaggtaagctaa

SEQ ID NO: 35214 - DNA, 15 bp, Homo sapiens
agaaggtaagctaaa

SEQ ID NO: 35215 - DNA, 15 bp, Homo sapiens
gaaggtaagctaaac

SEQ ID NO: 35216 - DNA, 15 bp, Homo sapiens
aaggtaagctaaaca

SEQ ID NO: 35217 - DNA, 15 bp, Homo sapiens
aggtaagctaaacag

SEQ ID NO: 35218 - DNA, 15 bp, Homo sapiens
ggtaagctaaacaga

SEQ ID NO: 35219 - DNA, 15 bp, Homo sapiens
gtaagctaaacagaa

SEQ ID NO: 35220 - DNA, 15 bp, Homo sapiens
taagctaaacagaag

SEQ ID NO: 35221 - DNA, 15 bp, Homo sapiens
aagctaaacagaagg

SEQ ID NO: 35222 - DNA, 15 bp, Homo sapiens
agctaaacagaaggt

SEQ ID NO: 35223 - DNA, 15 bp, Homo sapiens
gctaaacagaaggta

SEQ ID NO: 35224 - DNA, 15 bp, Homo sapiens
ctaaacagaaggtat

SEQ ID NO: 35225 - DNA, 15 bp, Homo sapiens
taaacagaaggtatt

SEQ ID NO: 35226 - DNA, 15 bp, Homo sapiens
aaacagaaggtattt

SEQ ID NO: 35227 - DNA, 15 bp, Homo sapiens
aacagaaggtatttt

SEQ ID NO: 35228 - DNA, 15 bp, Homo sapiens
acagaaggtatttta

SEQ ID NO: 35229 - DNA, 15 bp, Homo sapiens
cagaaggtattttag

SEQ ID NO: 35230 - DNA, 15 bp, Homo sapiens
agaaggtattttaga

SEQ ID NO: 35231 - DNA, 15 bp, Homo sapiens
gaaggtattttagag

SEQ ID NO: 35232 - DNA, 15 bp, Homo sapiens
aaggtattttagaga

SEQ ID NO: 35233 - DNA, 15 bp, Homo sapiens
aggtattttagagac

SEQ ID NO: 35234 - DNA, 15 bp, Homo sapiens
ggtattttagagacg

SEQ ID NO: 35235 - DNA, 15 bp, Homo sapiens
gtattttagagacga

SEQ ID NO: 35236 - DNA, 15 bp, Homo sapiens
tattttagagacgac

SEQ ID NO: 35237 - DNA, 15 bp, Homo sapiens
attttagagacgaca

SEQ ID NO: 35238 - DNA, 15 bp, Homo sapiens
ttttagagacgacaa

SEQ ID NO: 35239 - DNA, 15 bp, Homo sapiens
tttagagacgacaaa

SEQ ID NO: 35240 - DNA, 15 bp, Homo sapiens
ttagagacgacaaat

SEQ ID NO: 35241 - DNA, 15 bp, Homo sapiens
tagagacgacaaatg

SEQ ID NO: 35242 - DNA, 15 bp, Homo sapiens
agagacgacaaatga

SEQ ID NO: 35243 - DNA, 15 bp, Homo sapiens
gagacgacaaatgaa

SEQ ID NO: 35244 - DNA, 15 bp, Homo sapiens
agacgacaaatgaat

SEQ ID NO: 35245 - DNA, 15 bp, Homo sapiens
gacgacaaatgaata

SEQ ID NO: 35246 - DNA, 15 bp, Homo sapiens
acgacaaatgaataa

SEQ ID NO: 35247 - DNA, 15 bp, Homo sapiens
cgacaaatgaataat

SEQ ID NO: 35248 - DNA, 15 bp, Homo sapiens
gacaaatgaataatt

SEQ ID NO: 35249 - DNA, 15 bp, Homo sapiens
acaaatgaataattt

SEQ ID NO: 35250 - DNA, 15 bp, Homo sapiens
caaatgaataatttc

SEQ ID NO: 35251 - DNA, 15 bp, Homo sapiens
aaatgaataatttcg

SEQ ID NO: 35252 - DNA, 15 bp, Homo sapiens
aatgaataatttcga

SEQ ID NO: 35253 - DNA, 15 bp, Homo sapiens
atgaataatttcgag

SEQ ID NO: 35254 - DNA, 15 bp, Homo sapiens
tgaataatttcgagt

SEQ ID NO: 35255 - DNA, 15 bp, Homo sapiens
gaataatttcgagtt

SEQ ID NO: 35256 - DNA, 15 bp, Homo sapiens
aataatttcgagtta

SEQ ID NO: 35257 - DNA, 15 bp, Homo sapiens
ataatttcgagttat

SEQ ID NO: 35258 - DNA, 15 bp, Homo sapiens
taatttcgagttatg

SEQ ID NO: 35259 - DNA, 15 bp, Homo sapiens
aatttcgagttatgc

SEQ ID NO: 35260 - DNA, 15 bp, Homo sapiens
atttcgagttatgca

SEQ ID NO: 35261 - DNA, 15 bp, Homo sapiens
tttcgagttatgcag

SEQ ID NO: 35262 - DNA, 15 bp, Homo sapiens
ttcgagttatgcagg

SEQ ID NO: 35263 - DNA, 15 bp, Homo sapiens
tcgagttatgcagga

SEQ ID NO: 35264 - DNA, 15 bp, Homo sapiens
cgagttatgcaggaa

SEQ ID NO: 35265 - DNA, 15 bp, Homo sapiens
gagttatgcaggaaa

SEQ ID NO: 35266 - DNA, 15 bp, Homo sapiens
agttatgcaggaaat

SEQ ID NO: 35267 - DNA, 15 bp, Homo sapiens
gttatgcaggaaatg

SEQ ID NO: 35268 - DNA, 15 bp, Homo sapiens
ttatgcaggaaatgt

SEQ ID NO: 35269 - DNA, 15 bp, Homo sapiens
tatgcaggaaatgtt

SEQ ID NO: 35270 - DNA, 15 bp, Homo sapiens
atgcaggaaatgtta

SEQ ID NO: 35271 - DNA, 15 bp, Homo sapiens
tgcaggaaatgttac

SEQ ID NO: 35272 - DNA, 15 bp, Homo sapiens
gcaggaaatgttacg

SEQ ID NO: 35273 - DNA, 15 bp, Homo sapiens
caggaaatgttacga

SEQ ID NO: 35274 - DNA, 15 bp, Homo sapiens
aggaaatgttacgat

SEQ ID NO: 35275 - DNA, 15 bp, Homo sapiens
ggaaatgttacgatt

SEQ ID NO: 35276 - DNA, 15 bp, Homo sapiens
gaaatgttacgattt

SEQ ID NO: 35277 - DNA, 15 bp, Homo sapiens
aaatgttacgatttt

SEQ ID NO: 35278 - DNA, 15 bp, Homo sapiens
aatgttacgattttt

SEQ ID NO: 35279 - DNA, 15 bp, Homo sapiens
atgttacgatttttt

SEQ ID NO: 35280 - DNA, 15 bp, Homo sapiens
tgttacgattttttg

SEQ ID NO: 35281 - DNA, 15 bp, Homo sapiens
gttacgattttttgt

SEQ ID NO: 35282 - DNA, 15 bp, Homo sapiens
ttacgattttttgtt

SEQ ID NO: 35283 - DNA, 15 bp, Homo sapiens
tacgattttttgtta

SEQ ID NO: 35284 - DNA, 15 bp, Homo sapiens
acgattttttgttat

SEQ ID NO: 35285 - DNA, 15 bp, Homo sapiens
cgattttttgttatg

SEQ ID NO: 35286 - DNA, 15 bp, Homo sapiens
gattttttgttatga

SEQ ID NO: 35287 - DNA, 15 bp, Homo sapiens
attttttgttatgat

SEQ ID NO: 35288 - DNA, 15 bp, Homo sapiens
ttttttgttatgatt

SEQ ID NO: 35289 - DNA, 15 bp, Homo sapiens
tttttgttatgattt

SEQ ID NO: 35290 - DNA, 15 bp, Homo sapiens
ttttgttatgatttt

SEQ ID NO: 35291 - DNA, 15 bp, Homo sapiens
tttgttatgattttt

SEQ ID NO: 35292 - DNA, 15 bp, Homo sapiens
ttgttatgatttttt

SEQ ID NO: 35293 - DNA, 15 bp, Homo sapiens
tgttatgatttttta

SEQ ID NO: 35294 - DNA, 15 bp, Homo sapiens
gttatgattttttag

SEQ ID NO: 35295 - DNA, 15 bp, Homo sapiens
ttatgattttttagg

SEQ ID NO: 35296 - DNA, 15 bp, Homo sapiens
tatgattttttaggt

SEQ ID NO: 35297 - DNA, 15 bp, Homo sapiens
atgattttttaggtc

SEQ ID NO: 35298 - DNA, 15 bp, Homo sapiens
tgattttttaggtca

SEQ ID NO: 35299 - DNA, 15 bp, Homo sapiens
gattttttaggtcat

SEQ ID NO: 35300 - DNA, 15 bp, Homo sapiens
attttttaggtcatt

SEQ ID NO: 35301 - DNA, 15 bp, Homo sapiens
ttttttaggtcattc

SEQ ID NO: 35302 - DNA, 15 bp, Homo sapiens
tttttaggtcattcc

SEQ ID NO: 35303 - DNA, 15 bp, Homo sapiens
ttttaggtcattcct

SEQ ID NO: 35304 - DNA, 15 bp, Homo sapiens
tttaggtcattccta

SEQ ID NO: 35305 - DNA, 15 bp, Homo sapiens
ttaggtcattcctag

SEQ ID NO: 35306 - DNA, 15 bp, Homo sapiens
taggtcattcctagc

SEQ ID NO: 35307 - DNA, 15 bp, Homo sapiens
aggtcattcctagcc

SEQ ID NO: 35308 - DNA, 15 bp, Homo sapiens
ggtcattcctagccc

SEQ ID NO: 35309 - DNA, 15 bp, Homo sapiens
gtcattcctagccca

SEQ ID NO: 35310 - DNA, 15 bp, Homo sapiens
tcattcctagcccat

SEQ ID NO: 35311 - DNA, 15 bp, Homo sapiens
cattcctagcccatt

SEQ ID NO: 35312 - DNA, 15 bp, Homo sapiens
attcctagcccattc

SEQ ID NO: 35313 - DNA, 15 bp, Homo sapiens
ttcctagcccattca

SEQ ID NO: 35314 - DNA, 15 bp, Homo sapiens
tcctagcccattcag

SEQ ID NO: 35315 - DNA, 15 bp, Homo sapiens
cctagcccattcagt

SEQ ID NO: 35316 - DNA, 15 bp, Homo sapiens
ctagcccattcagtg

SEQ ID NO: 35317 - DNA, 15 bp, Homo sapiens
tagcccattcagtgc

SEQ ID NO: 35318 - DNA, 15 bp, Homo sapiens
agcccattcagtgcc

SEQ ID NO: 35319 - DNA, 15 bp, Homo sapiens
gcccattcagtgccc

SEQ ID NO: 35320 - DNA, 15 bp, Homo sapiens
cccattcagtgccca

SEQ ID NO: 35321 - DNA, 15 bp, Homo sapiens
ccattcagtgcccac

SEQ ID NO: 35322 - DNA, 15 bp, Homo sapiens
cattcagtgcccact

SEQ ID NO: 35323 - DNA, 15 bp, Homo sapiens
attcagtgcccactc

SEQ ID NO: 35324 - DNA, 15 bp, Homo sapiens
ttcagtgcccactct

SEQ ID NO: 35325 - DNA, 15 bp, Homo sapiens
tcagtgcccactctt

SEQ ID NO: 35326 - DNA, 15 bp, Homo sapiens
cagtgcccactcttt

SEQ ID NO: 35327 - DNA, 15 bp, Homo sapiens
agtgcccactctttt

SEQ ID NO: 35328 - DNA, 15 bp, Homo sapiens
gtgcccactcttttg

SEQ ID NO: 35329 - DNA, 15 bp, Homo sapiens
tgcccactcttttgt

SEQ ID NO: 35330 - DNA, 15 bp, Homo sapiens
gcccactcttttgtg

SEQ ID NO: 35331 - DNA, 15 bp, Homo sapiens
cccactcttttgtgc

SEQ ID NO: 35332 - DNA, 15 bp, Homo sapiens
ccactcttttgtgca

SEQ ID NO: 35333 - DNA, 15 bp, Homo sapiens
cactcttttgtgcag

SEQ ID NO: 35334 - DNA, 15 bp, Homo sapiens
actcttttgtgcagt

SEQ ID NO: 35335 - DNA, 15 bp, Homo sapiens
ctcttttgtgcagtc

SEQ ID NO: 35336 - DNA, 15 bp, Homo sapiens
tcttttgtgcagtcc

SEQ ID NO: 35337 - DNA, 15 bp, Homo sapiens
cttttgtgcagtcct

SEQ ID NO: 35338 - DNA, 15 bp, Homo sapiens
ttttgtgcagtcctg

SEQ ID NO: 35339 - DNA, 15 bp, Homo sapiens
tttgtgcagtcctgt

SEQ ID NO: 35340 - DNA, 15 bp, Homo sapiens
ttgtgcagtcctgta

SEQ ID NO: 35341 - DNA, 15 bp, Homo sapiens
tgtgcagtcctgtat

SEQ ID NO: 35342 - DNA, 15 bp, Homo sapiens
gtgcagtcctgtatg

SEQ ID NO: 35343 - DNA, 15 bp, Homo sapiens
tgcagtcctgtatgc

SEQ ID NO: 35344 - DNA, 15 bp, Homo sapiens
gcagtcctgtatgcg

SEQ ID NO: 35345 - DNA, 15 bp, Homo sapiens
cagtcctgtatgcgc

SEQ ID NO: 35346 - DNA, 15 bp, Homo sapiens
agtcctgtatgcgca

SEQ ID NO: 35347 - DNA, 15 bp, Homo sapiens
gtcctgtatgcgcag

SEQ ID NO: 35348 - DNA, 15 bp, Homo sapiens
tcctgtatgcgcagg

SEQ ID NO: 35349 - DNA, 15 bp, Homo sapiens
cctgtatgcgcaggg

SEQ ID NO: 35350 - DNA, 15 bp, Homo sapiens
ctgtatgcgcagggc

SEQ ID NO: 35351 - DNA, 15 bp, Homo sapiens
tgtatgcgcagggct

SEQ ID NO: 35352 - DNA, 15 bp, Homo sapiens
gtatgcgcagggctt

SEQ ID NO: 35353 - DNA, 15 bp, Homo sapiens
tatgcgcagggcttg

SEQ ID NO: 35354 - DNA, 15 bp, Homo sapiens
atgcgcagggcttgg

SEQ ID NO: 35355 - DNA, 15 bp, Homo sapiens
tgcgcagggcttggc

SEQ ID NO: 35356 - DNA, 15 bp, Homo sapiens
gcgcagggcttggca

SEQ ID NO: 35357 - DNA, 15 bp, Homo sapiens
cgcagggcttggcaa

SEQ ID NO: 35358 - DNA, 15 bp, Homo sapiens
gcagggcttggcaag

SEQ ID NO: 35359 - DNA, 15 bp, Homo sapiens
cagggcttggcaagc

SEQ ID NO: 35360 - DNA, 15 bp, Homo sapiens
agggcttggcaagca

SEQ ID NO: 35361 - DNA, 15 bp, Homo sapiens
gggcttggcaagcag

SEQ ID NO: 35362 - DNA, 15 bp, Homo sapiens
ggcttggcaagcaga

SEQ ID NO: 35363 - DNA, 15 bp, Homo sapiens
gcttggcaagcagac

SEQ ID NO: 35364 - DNA, 15 bp, Homo sapiens
cttggcaagcagact

SEQ ID NO: 35365 - DNA, 15 bp, Homo sapiens
ttggcaagcagactt

SEQ ID NO: 35366 - DNA, 15 bp, Homo sapiens
tggcaagcagactta

SEQ ID NO: 35367 - DNA, 15 bp, Homo sapiens
ggcaagcagacttac

SEQ ID NO: 35368 - DNA, 15 bp, Homo sapiens
gcaagcagacttact

SEQ ID NO: 35369 - DNA, 15 bp, Homo sapiens
caagcagacttactg

SEQ ID NO: 35370 - DNA, 15 bp, Homo sapiens
aagcagacttactgg

SEQ ID NO: 35371 - DNA, 15 bp, Homo sapiens
agcagacttactggg

SEQ ID NO: 35372 - DNA, 15 bp, Homo sapiens
gcagacttactgggc

SEQ ID NO: 35373 - DNA, 15 bp, Homo sapiens
cagacttactgggca

SEQ ID NO: 35374 - DNA, 15 bp, Homo sapiens
agacttactgggcag

SEQ ID NO: 35375 - DNA, 15 bp, Homo sapiens
gacttactgggcaga

SEQ ID NO: 35376 - DNA, 15 bp, Homo sapiens
acttactgggcagac

SEQ ID NO: 35377 - DNA, 15 bp, Homo sapiens
cttactgggcagact

SEQ ID NO: 35378 - DNA, 15 bp, Homo sapiens
ttactgggcagactg

SEQ ID NO: 35379 - DNA, 15 bp, Homo sapiens
tactgggcagactga

SEQ ID NO: 35380 - DNA, 15 bp, Homo sapiens
actgggcagactgat

SEQ ID NO: 35381 - DNA, 15 bp, Homo sapiens
ctgggcagactgata

SEQ ID NO: 35382 - DNA, 15 bp, Homo sapiens
tgggcagactgatat

SEQ ID NO: 35383 - DNA, 15 bp, Homo sapiens
gggcagactgatatt

SEQ ID NO: 35384 - DNA, 15 bp, Homo sapiens
ggcagactgatattg

SEQ ID NO: 35385 - DNA, 15 bp, Homo sapiens
gcagactgatattgt

SEQ ID NO: 35386 - DNA, 15 bp, Homo sapiens
cagactgatattgta

SEQ ID NO: 35387 - DNA, 15 bp, Homo sapiens
agactgatattgtac

SEQ ID NO: 35388 - DNA, 15 bp, Homo sapiens
gactgatattgtaca

SEQ ID NO: 35389 - DNA, 15 bp, Homo sapiens
actgatattgtacat

SEQ ID NO: 35390 - DNA, 15 bp, Homo sapiens
ctgatattgtacatg

SEQ ID NO: 35391 - DNA, 15 bp, Homo sapiens
tgatattgtacatgg

SEQ ID NO: 35392 - DNA, 15 bp, Homo sapiens
gatattgtacatggt

SEQ ID NO: 35393 - DNA, 15 bp, Homo sapiens
atattgtacatggta

SEQ ID NO: 35394 - DNA, 15 bp, Homo sapiens
tattgtacatggtaa

SEQ ID NO: 35395 - DNA, 15 bp, Homo sapiens
attgtacatggtaag

SEQ ID NO: 35396 - DNA, 15 bp, Homo sapiens
ttgtacatggtaagg

SEQ ID NO: 35397 - DNA, 15 bp, Homo sapiens
tgtacatggtaagga

SEQ ID NO: 35398 - DNA, 15 bp, Homo sapiens
gtacatggtaaggag

SEQ ID NO: 35399 - DNA, 15 bp, Homo sapiens
tacatggtaaggagg

SEQ ID NO: 35400 - DNA, 15 bp, Homo sapiens
acatggtaaggagga

SEQ ID NO: 35401 - DNA, 15 bp, Homo sapiens
catggtaaggaggaa

SEQ ID NO: 35402 - DNA, 15 bp, Homo sapiens
atggtaaggaggaaa

SEQ ID NO: 35403 - DNA, 15 bp, Homo sapiens
tggtaaggaggaaaa

SEQ ID NO: 35404 - DNA, 15 bp, Homo sapiens
ggtaaggaggaaaac

SEQ ID NO: 35405 - DNA, 15 bp, Homo sapiens
gtaaggaggaaaacc

SEQ ID NO: 35406 - DNA, 15 bp, Homo sapiens
taaggaggaaaaccc

SEQ ID NO: 35407 - DNA, 15 bp, Homo sapiens
aaggaggaaaacccc

SEQ ID NO: 35408 - DNA, 15 bp, Homo sapiens
aggaggaaaacccct

SEQ ID NO: 35409 - DNA, 15 bp, Homo sapiens
ggaggaaaacccctt

SEQ ID NO: 35410 - DNA, 15 bp, Homo sapiens
gaggaaaaccccttc

SEQ ID NO: 35411 - DNA, 15 bp, Homo sapiens
aggaaaaccccttcc

SEQ ID NO: 35412 - DNA, 15 bp, Homo sapiens
ggaaaaccccttccc

SEQ ID NO: 35413 - DNA, 15 bp, Homo sapiens
gaaaaccccttcccc

SEQ ID NO: 35414 - DNA, 15 bp, Homo sapiens
aaaaccccttcccca

SEQ ID NO: 35415 - DNA, 15 bp, Homo sapiens
aaaccccttccccag

SEQ ID NO: 35416 - DNA, 15 bp, Homo sapiens
aaccccttccccagc

SEQ ID NO: 35417 - DNA, 15 bp, Homo sapiens
accccttccccagca

SEQ ID NO: 35418 - DNA, 15 bp, Homo sapiens
ccccttccccagcat

SEQ ID NO: 35419 - DNA, 15 bp, Homo sapiens
cccttccccagcatg

SEQ ID NO: 35420 - DNA, 15 bp, Homo sapiens
ccttccccagcatgc

SEQ ID NO: 35421 - DNA, 15 bp, Homo sapiens
cttccccagcatgct

SEQ ID NO: 35422 - DNA, 15 bp, Homo sapiens
ttccccagcatgcta

SEQ ID NO: 35423 - DNA, 15 bp, Homo sapiens
tccccagcatgctag

SEQ ID NO: 35424 - DNA, 15 bp, Homo sapiens
ccccagcatgctagc

SEQ ID NO: 35425 - DNA, 15 bp, Homo sapiens
cccagcatgctagca

SEQ ID NO: 35426 - DNA, 15 bp, Homo sapiens
ccagcatgctagcag

SEQ ID NO: 35427 - DNA, 15 bp, Homo sapiens
cagcatgctagcagc

SEQ ID NO: 35428 - DNA, 15 bp, Homo sapiens
agcatgctagcagcc

SEQ ID NO: 35429 - DNA, 15 bp, Homo sapiens
gcatgctagcagccc

SEQ ID NO: 35430 - DNA, 15 bp, Homo sapiens
catgctagcagccct

SEQ ID NO: 35431 - DNA, 15 bp, Homo sapiens
atgctagcagccctg

SEQ ID NO: 35432 - DNA, 15 bp, Homo sapiens
tgctagcagccctgg

SEQ ID NO: 35433 - DNA, 15 bp, Homo sapiens
gctagcagccctggg

SEQ ID NO: 35434 - DNA, 15 bp, Homo sapiens
ctagcagccctgggc

SEQ ID NO: 35435 - DNA, 15 bp, Homo sapiens
tagcagccctgggct

SEQ ID NO: 35436 - DNA, 15 bp, Homo sapiens
agcagccctgggctt

SEQ ID NO: 35437 - DNA, 15 bp, Homo sapiens
gcagccctgggcttt

SEQ ID NO: 35438 - DNA, 15 bp, Homo sapiens
cagccctgggcttta

SEQ ID NO: 35439 - DNA, 15 bp, Homo sapiens
agccctgggctttag

SEQ ID NO: 35440 - DNA, 15 bp, Homo sapiens
gccctgggctttaga

SEQ ID NO: 35441 - DNA, 15 bp, Homo sapiens
ccctgggctttagat

SEQ ID NO: 35442 - DNA, 15 bp, Homo sapiens
cctgggctttagatc

SEQ ID NO: 35443 - DNA, 15 bp, Homo sapiens
ctgggctttagatct

SEQ ID NO: 35444 - DNA, 15 bp, Homo sapiens
tgggctttagatctg

SEQ ID NO: 35445 - DNA, 15 bp, Homo sapiens
gggctttagatctgg

SEQ ID NO: 35446 - DNA, 15 bp, Homo sapiens
ggctttagatctgga

SEQ ID NO: 35447 - DNA, 15 bp, Homo sapiens
gctttagatctggat

SEQ ID NO: 35448 - DNA, 15 bp, Homo sapiens
ctttagatctggatc

SEQ ID NO: 35449 - DNA, 15 bp, Homo sapiens
tttagatctggatct

SEQ ID NO: 35450 - DNA, 15 bp, Homo sapiens
ttagatctggatctc

SEQ ID NO: 35451 - DNA, 15 bp, Homo sapiens
tagatctggatctcc

SEQ ID NO: 35452 - DNA, 15 bp, Homo sapiens
agatctggatctccc

SEQ ID NO: 35453 - DNA, 15 bp, Homo sapiens
gatctggatctccca

SEQ ID NO: 35454 - DNA, 15 bp, Homo sapiens
atctggatctcccaa

SEQ ID NO: 35455 - DNA, 15 bp, Homo sapiens
tctggatctcccaac

SEQ ID NO: 35456 - DNA, 15 bp, Homo sapiens
ctggatctcccaact

SEQ ID NO: 35457 - DNA, 15 bp, Homo sapiens
tggatctcccaactc

SEQ ID NO: 35458 - DNA, 15 bp, Homo sapiens
ggatctcccaactcc

SEQ ID NO: 35459 - DNA, 15 bp, Homo sapiens
gatctcccaactcct

SEQ ID NO: 35460 - DNA, 15 bp, Homo sapiens
atctcccaactcctt

SEQ ID NO: 35461 - DNA, 15 bp, Homo sapiens
tctcccaactccttc

SEQ ID NO: 35462 - DNA, 15 bp, Homo sapiens
ctcccaactccttca

SEQ ID NO: 35463 - DNA, 15 bp, Homo sapiens
tcccaactccttcag

SEQ ID NO: 35464 - DNA, 15 bp, Homo sapiens
cccaactccttcagg

SEQ ID NO: 35465 - DNA, 15 bp, Homo sapiens
ccaactccttcagga

SEQ ID NO: 35466 - DNA, 15 bp, Homo sapiens
caactccttcaggag

SEQ ID NO: 35467 - DNA, 15 bp, Homo sapiens
aactccttcaggagc

SEQ ID NO: 35468 - DNA, 15 bp, Homo sapiens
actccttcaggagcc

SEQ ID NO: 35469 - DNA, 15 bp, Homo sapiens
ctccttcaggagcct

SEQ ID NO: 35470 - DNA, 15 bp, Homo sapiens
tccttcaggagcctt

SEQ ID NO: 35471 - DNA, 15 bp, Homo sapiens
ccttcaggagccttt

SEQ ID NO: 35472 - DNA, 15 bp, Homo sapiens
cttcaggagcctttg

SEQ ID NO: 35473 - DNA, 15 bp, Homo sapiens
ttcaggagcctttgt

SEQ ID NO: 35474 - DNA, 15 bp, Homo sapiens
tcaggagcctttgtg

SEQ ID NO: 35475 - DNA, 15 bp, Homo sapiens
caggagcctttgtgc

SEQ ID NO: 35476 - DNA, 15 bp, Homo sapiens
aggagcctttgtgca

SEQ ID NO: 35477 - DNA, 15 bp, Homo sapiens
ggagcctttgtgcag

SEQ ID NO: 35478 - DNA, 15 bp, Homo sapiens
gagcctttgtgcagg

SEQ ID NO: 35479 - DNA, 15 bp, Homo sapiens
agcctttgtgcagga

SEQ ID NO: 35480 - DNA, 15 bp, Homo sapiens
gcctttgtgcaggac

SEQ ID NO: 35481 - DNA, 15 bp, Homo sapiens
cctttgtgcaggaca

SEQ ID NO: 35482 - DNA, 15 bp, Homo sapiens
ctttgtgcaggacac

SEQ ID NO: 35483 - DNA, 15 bp, Homo sapiens
tttgtgcaggacaca

SEQ ID NO: 35484 - DNA, 15 bp, Homo sapiens
ttgtgcaggacacaa

SEQ ID NO: 35485 - DNA, 15 bp, Homo sapiens
tgtgcaggacacaac

SEQ ID NO: 35486 - DNA, 15 bp, Homo sapiens
gtgcaggacacaacc

SEQ ID NO: 35487 - DNA, 15 bp, Homo sapiens
tgcaggacacaacct

SEQ ID NO: 35488 - DNA, 15 bp, Homo sapiens
gcaggacacaaccta

SEQ ID NO: 35489 - DNA, 15 bp, Homo sapiens
caggacacaacctac

SEQ ID NO: 35490 - DNA, 15 bp, Homo sapiens
aggacacaacctacc

SEQ ID NO: 35491 - DNA, 15 bp, Homo sapiens
ggacacaacctacct

SEQ ID NO: 35492 - DNA, 15 bp, Homo sapiens
gacacaacctaccta

SEQ ID NO: 35493 - DNA, 15 bp, Homo sapiens
acacaacctacctat

SEQ ID NO: 35494 - DNA, 15 bp, Homo sapiens
cacaacctacctata

SEQ ID NO: 35495 - DNA, 15 bp, Homo sapiens
acaacctacctatat

SEQ ID NO: 35496 - DNA, 15 bp, Homo sapiens
caacctacctatata

SEQ ID NO: 35497 - DNA, 15 bp, Homo sapiens
aacctacctatataa

SEQ ID NO: 35498 - DNA, 15 bp, Homo sapiens
acctacctatataat

SEQ ID NO: 35499 - DNA, 15 bp, Homo sapiens
cctacctatataatc

SEQ ID NO: 35500 - DNA, 15 bp, Homo sapiens
ctacctatataatca

SEQ ID NO: 35501 - DNA, 15 bp, Homo sapiens
tacctatataatcaa

SEQ ID NO: 35502 - DNA, 15 bp, Homo sapiens
acctatataatcaac

SEQ ID NO: 35503 - DNA, 15 bp, Homo sapiens
cctatataatcaaca

SEQ ID NO: 35504 - DNA, 15 bp, Homo sapiens
ctatataatcaacat

SEQ ID NO: 35505 - DNA, 15 bp, Homo sapiens
tatataatcaacatg

SEQ ID NO: 35506 - DNA, 15 bp, Homo sapiens
atataatcaacatgg

SEQ ID NO: 35507 - DNA, 15 bp, Homo sapiens
tataatcaacatgga

SEQ ID NO: 35508 - DNA, 15 bp, Homo sapiens
ataatcaacatggag

SEQ ID NO: 35509 - DNA, 15 bp, Homo sapiens
taatcaacatggagt

SEQ ID NO: 35510 - DNA, 15 bp, Homo sapiens
aatcaacatggagtt

SEQ ID NO: 35511 - DNA, 15 bp, Homo sapiens
atcaacatggagttg

SEQ ID NO: 35512 - DNA, 15 bp, Homo sapiens
tcaacatggagttgc

SEQ ID NO: 35513 - DNA, 15 bp, Homo sapiens
caacatggagttgcc

SEQ ID NO: 35514 - DNA, 15 bp, Homo sapiens
aacatggagttgccc

SEQ ID NO: 35515 - DNA, 15 bp, Homo sapiens
acatggagttgccct

SEQ ID NO: 35516 - DNA, 15 bp, Homo sapiens
catggagttgccctt

SEQ ID NO: 35517 - DNA, 15 bp, Homo sapiens
atggagttgccctta

SEQ ID NO: 35518 - DNA, 15 bp, Homo sapiens
tggagttgcccttat

SEQ ID NO: 35519 - DNA, 15 bp, Homo sapiens
ggagttgcccttata

SEQ ID NO: 35520 - DNA, 15 bp, Homo sapiens
gagttgcccttatat

SEQ ID NO: 35521 - DNA, 15 bp, Homo sapiens
agttgcccttatatg

SEQ ID NO: 35522 - DNA, 15 bp, Homo sapiens
gttgcccttatatgt

SEQ ID NO: 35523 - DNA, 15 bp, Homo sapiens
ttgcccttatatgta

SEQ ID NO: 35524 - DNA, 15 bp, Homo sapiens
tgcccttatatgtaa

SEQ ID NO: 35525 - DNA, 15 bp, Homo sapiens
gcccttatatgtaat

SEQ ID NO: 35526 - DNA, 15 bp, Homo sapiens
cccttatatgtaatc

SEQ ID NO: 35527 - DNA, 15 bp, Homo sapiens
ccttatatgtaatca

SEQ ID NO: 35528 - DNA, 15 bp, Homo sapiens
cttatatgtaatcat

SEQ ID NO: 35529 - DNA, 15 bp, Homo sapiens
ttatatgtaatcatt

SEQ ID NO: 35530 - DNA, 15 bp, Homo sapiens
tatatgtaatcattt

SEQ ID NO: 35531 - DNA, 15 bp, Homo sapiens
atatgtaatcatttt

SEQ ID NO: 35532 - DNA, 15 bp, Homo sapiens
tatgtaatcattttg

SEQ ID NO: 35533 - DNA, 15 bp, Homo sapiens
atgtaatcattttgg

SEQ ID NO: 35534 - DNA, 15 bp, Homo sapiens
tgtaatcattttggc

SEQ ID NO: 35535 - DNA, 15 bp, Homo sapiens
gtaatcattttggct

SEQ ID NO: 35536 - DNA, 15 bp, Homo sapiens
taatcattttggctt

SEQ ID NO: 35537 - DNA, 15 bp, Homo sapiens
aatcattttggcttc

SEQ ID NO: 35538 - DNA, 15 bp, Homo sapiens
atcattttggcttct

SEQ ID NO: 35539 - DNA, 15 bp, Homo sapiens
tcattttggcttctg

SEQ ID NO: 35540 - DNA, 15 bp, Homo sapiens
cattttggcttctgt

SEQ ID NO: 35541 - DNA, 15 bp, Homo sapiens
attttggcttctgta

SEQ ID NO: 35542 - DNA, 15 bp, Homo sapiens
ttttggcttctgtac

SEQ ID NO: 35543 - DNA, 15 bp, Homo sapiens
tttggcttctgtact

SEQ ID NO: 35544 - DNA, 15 bp, Homo sapiens
ttggcttctgtacta

SEQ ID NO: 35545 - DNA, 15 bp, Homo sapiens
tggcttctgtactat

SEQ ID NO: 35546 - DNA, 15 bp, Homo sapiens
ggcttctgtactatt

SEQ ID NO: 35547 - DNA, 15 bp, Homo sapiens
gcttctgtactattt

SEQ ID NO: 35548 - DNA, 15 bp, Homo sapiens
cttctgtactatttg

SEQ ID NO: 35549 - DNA, 15 bp, Homo sapiens
ttctgtactatttgt

SEQ ID NO: 35550 - DNA, 15 bp, Homo sapiens
tctgtactatttgta

SEQ ID NO: 35551 - DNA, 15 bp, Homo sapiens
ctgtactatttgtac

SEQ ID NO: 35552 - DNA, 15 bp, Homo sapiens
tgtactatttgtact

SEQ ID NO: 35553 - DNA, 15 bp, Homo sapiens
gtactatttgtacta

SEQ ID NO: 35554 - DNA, 15 bp, Homo sapiens
tactatttgtactat

SEQ ID NO: 35555 - DNA, 15 bp, Homo sapiens
actatttgtactata

SEQ ID NO: 35556 - DNA, 15 bp, Homo sapiens
ctatttgtactatat

SEQ ID NO: 35557 - DNA, 15 bp, Homo sapiens
tatttgtactatata

SEQ ID NO: 35558 - DNA, 15 bp, Homo sapiens
atttgtactatatac

SEQ ID NO: 35559 - DNA, 15 bp, Homo sapiens
tttgtactatatact

SEQ ID NO: 35560 - DNA, 15 bp, Homo sapiens
ttgtactatatacta

SEQ ID NO: 35561 - DNA, 15 bp, Homo sapiens
tgtactatatactaa

SEQ ID NO: 35562 - DNA, 15 bp, Homo sapiens
gtactatatactaaa

SEQ ID NO: 35563 - DNA, 15 bp, Homo sapiens
tactatatactaaat

SEQ ID NO: 35564 - DNA, 15 bp, Homo sapiens
actatatactaaata

SEQ ID NO: 35565 - DNA, 15 bp, Homo sapiens
ctatatactaaatat

SEQ ID NO: 35566 - DNA, 15 bp, Homo sapiens
tatatactaaatatc

SEQ ID NO: 35567 - DNA, 15 bp, Homo sapiens
atatactaaatatct

SEQ ID NO: 35568 - DNA, 15 bp, Homo sapiens
tatactaaatatcta

SEQ ID NO: 35569 - DNA, 15 bp, Homo sapiens
atactaaatatctaa

SEQ ID NO: 35570 - DNA, 15 bp, Homo sapiens
tactaaatatctaag

SEQ ID NO: 35571 - DNA, 15 bp, Homo sapiens
actaaatatctaaga

SEQ ID NO: 35572 - DNA, 15 bp, Homo sapiens
ctaaatatctaagat

SEQ ID NO: 35573 - DNA, 15 bp, Homo sapiens
taaatatctaagatg

SEQ ID NO: 35574 - DNA, 15 bp, Homo sapiens
aaatatctaagatgt

SEQ ID NO: 35575 - DNA, 15 bp, Homo sapiens
aatatctaagatgtc

SEQ ID NO: 35576 - DNA, 15 bp, Homo sapiens
atatctaagatgtca

SEQ ID NO: 35577 - DNA, 15 bp, Homo sapiens
tatctaagatgtcaa

SEQ ID NO: 35578 - DNA, 15 bp, Homo sapiens
atctaagatgtcaag

SEQ ID NO: 35579 - DNA, 15 bp, Homo sapiens
tctaagatgtcaaga

SEQ ID NO: 35580 - DNA, 15 bp, Homo sapiens
ctaagatgtcaagaa

SEQ ID NO: 35581 - DNA, 15 bp, Homo sapiens
taagatgtcaagaaa

SEQ ID NO: 35582 - DNA, 15 bp, Homo sapiens
aagatgtcaagaaat

SEQ ID NO: 35583 - DNA, 15 bp, Homo sapiens
agatgtcaagaaata

SEQ ID NO: 35584 - DNA, 15 bp, Homo sapiens
gatgtcaagaaataa

SEQ ID NO: 35585 - DNA, 15 bp, Homo sapiens
atgtcaagaaataac

SEQ ID NO: 35586 - DNA, 15 bp, Homo sapiens
tgtcaagaaataact

SEQ ID NO: 35587 - DNA, 15 bp, Homo sapiens
gtcaagaaataactc

SEQ ID NO: 35588 - DNA, 15 bp, Homo sapiens
tcaagaaataactca

SEQ ID NO: 35589 - DNA, 15 bp, Homo sapiens
caagaaataactcaa

SEQ ID NO: 35590 - DNA, 15 bp, Homo sapiens
aagaaataactcaat

SEQ ID NO: 35591 - DNA, 15 bp, Homo sapiens
agaaataactcaata

SEQ ID NO: 35592 - DNA, 15 bp, Homo sapiens
gaaataactcaatat

SEQ ID NO: 35593 - DNA, 15 bp, Homo sapiens
aaataactcaatatt

SEQ ID NO: 35594 - DNA, 15 bp, Homo sapiens
aataactcaatattg

SEQ ID NO: 35595 - DNA, 15 bp, Homo sapiens
ataactcaatattga

SEQ ID NO: 35596 - DNA, 15 bp, Homo sapiens
taactcaatattgag

SEQ ID NO: 35597 - DNA, 15 bp, Homo sapiens
aactcaatattgaga

SEQ ID NO: 35598 - DNA, 15 bp, Homo sapiens
actcaatattgagaa

SEQ ID NO: 35599 - DNA, 15 bp, Homo sapiens
ctcaatattgagaaa

SEQ ID NO: 35600 - DNA, 15 bp, Homo sapiens
tcaatattgagaaaa

SEQ ID NO: 35601 - DNA, 15 bp, Homo sapiens
caatattgagaaaaa

SEQ ID NO: 35602 - DNA, 15 bp, Homo sapiens
aatattgagaaaaag

SEQ ID NO: 35603 - DNA, 15 bp, Homo sapiens
atattgagaaaaaga

SEQ ID NO: 35604 - DNA, 15 bp, Homo sapiens
tattgagaaaaagag

SEQ ID NO: 35605 - DNA, 15 bp, Homo sapiens
attgagaaaaagaga

SEQ ID NO: 35606 - DNA, 15 bp, Homo sapiens
ttgagaaaaagagag

SEQ ID NO: 35607 - DNA, 15 bp, Homo sapiens
tgagaaaaagagagg

SEQ ID NO: 35608 - DNA, 15 bp, Homo sapiens
gagaaaaagagaggt

SEQ ID NO: 35609 - DNA, 15 bp, Homo sapiens
agaaaaagagaggta

SEQ ID NO: 35610 - DNA, 15 bp, Homo sapiens
gaaaaagagaggtac

SEQ ID NO: 35611 - DNA, 15 bp, Homo sapiens
aaaaagagaggtaca

SEQ ID NO: 35612 - DNA, 15 bp, Homo sapiens
aaaagagaggtacat

SEQ ID NO: 35613 - DNA, 15 bp, Homo sapiens
aaagagaggtacata

SEQ ID NO: 35614 - DNA, 15 bp, Homo sapiens
aagagaggtacatat

SEQ ID NO: 35615 - DNA, 15 bp, Homo sapiens
agagaggtacatata

SEQ ID NO: 35616 - DNA, 15 bp, Homo sapiens
gagaggtacatatag

SEQ ID NO: 35617 - DNA, 15 bp, Homo sapiens
agaggtacatatagc

SEQ ID NO: 35618 - DNA, 15 bp, Homo sapiens
gaggtacatatagcc

SEQ ID NO: 35619 - DNA, 15 bp, Homo sapiens
aggtacatatagcca

SEQ ID NO: 35620 - DNA, 15 bp, Homo sapiens
ggtacatatagccaa

SEQ ID NO: 35621 - DNA, 15 bp, Homo sapiens
gtacatatagccaat

SEQ ID NO: 35622 - DNA, 15 bp, Homo sapiens
tacatatagccaatc

SEQ ID NO: 35623 - DNA, 15 bp, Homo sapiens
acatatagccaatct

SEQ ID NO: 35624 - DNA, 15 bp, Homo sapiens
catatagccaatctg

SEQ ID NO: 35625 - DNA, 15 bp, Homo sapiens
atatagccaatctga

SEQ ID NO: 35626 - DNA, 15 bp, Homo sapiens
tatagccaatctgaa

SEQ ID NO: 35627 - DNA, 15 bp, Homo sapiens
atagccaatctgaat

SEQ ID NO: 35628 - DNA, 15 bp, Homo sapiens
tagccaatctgaatg

SEQ ID NO: 35629 - DNA, 15 bp, Homo sapiens
agccaatctgaatgt

SEQ ID NO: 35630 - DNA, 15 bp, Homo sapiens
gccaatctgaatgtt

SEQ ID NO: 35631 - DNA, 15 bp, Homo sapiens
ccaatctgaatgttt

SEQ ID NO: 35632 - DNA, 15 bp, Homo sapiens
caatctgaatgtttt

SEQ ID NO: 35633 - DNA, 15 bp, Homo sapiens
aatctgaatgttttg

SEQ ID NO: 35634 - DNA, 15 bp, Homo sapiens
atctgaatgttttgt

SEQ ID NO: 35635 - DNA, 15 bp, Homo sapiens
tctgaatgttttgtt

SEQ ID NO: 35636 - DNA, 15 bp, Homo sapiens
ctgaatgttttgttg

SEQ ID NO: 35637 - DNA, 15 bp, Homo sapiens
tgaatgttttgttgc

SEQ ID NO: 35638 - DNA, 15 bp, Homo sapiens
gaatgttttgttgct

SEQ ID NO: 35639 - DNA, 15 bp, Homo sapiens
aatgttttgttgctt

SEQ ID NO: 35640 - DNA, 15 bp, Homo sapiens
atgttttgttgcttt

SEQ ID NO: 35641 - DNA, 15 bp, Homo sapiens
tgttttgttgcttta

SEQ ID NO: 35642 - DNA, 15 bp, Homo sapiens
gttttgttgctttag

SEQ ID NO: 35643 - DNA, 15 bp, Homo sapiens
ttttgttgctttagt

SEQ ID NO: 35644 - DNA, 15 bp, Homo sapiens
tttgttgctttagtt

SEQ ID NO: 35645 - DNA, 15 bp, Homo sapiens
ttgttgctttagtta

SEQ ID NO: 35646 - DNA, 15 bp, Homo sapiens
tgttgctttagttaa

SEQ ID NO: 35647 - DNA, 15 bp, Homo sapiens
gttgctttagttaac

SEQ ID NO: 35648 - DNA, 15 bp, Homo sapiens
ttgctttagttaact

SEQ ID NO: 35649 - DNA, 15 bp, Homo sapiens
tgctttagttaacta

SEQ ID NO: 35650 - DNA, 15 bp, Homo sapiens
gctttagttaactag

SEQ ID NO: 35651 - DNA, 15 bp, Homo sapiens
ctttagttaactaga

SEQ ID NO: 35652 - DNA, 15 bp, Homo sapiens
tttagttaactagac

SEQ ID NO: 35653 - DNA, 15 bp, Homo sapiens
ttagttaactagaca

SEQ ID NO: 35654 - DNA, 15 bp, Homo sapiens
tagttaactagacac

SEQ ID NO: 35655 - DNA, 15 bp, Homo sapiens
agttaactagacaca

SEQ ID NO: 35656 - DNA, 15 bp, Homo sapiens
gttaactagacacaa

SEQ ID NO: 35657 - DNA, 15 bp, Homo sapiens
ttaactagacacaac

SEQ ID NO: 35658 - DNA, 15 bp, Homo sapiens
taactagacacaact

SEQ ID NO: 35659 - DNA, 15 bp, Homo sapiens
aactagacacaacta

SEQ ID NO: 35660 - DNA, 15 bp, Homo sapiens
actagacacaactaa

SEQ ID NO: 35661 - DNA, 15 bp, Homo sapiens
ctagacacaactaaa

SEQ ID NO: 35662 - DNA, 15 bp, Homo sapiens
tagacacaactaaaa

SEQ ID NO: 35663 - DNA, 15 bp, Homo sapiens
agacacaactaaaaa

SEQ ID NO: 35664 - DNA, 15 bp, Homo sapiens
gacacaactaaaaat

SEQ ID NO: 35665 - DNA, 15 bp, Homo sapiens
acacaactaaaaatc

SEQ ID NO: 35666 - DNA, 15 bp, Homo sapiens
cacaactaaaaatcc

SEQ ID NO: 35667 - DNA, 15 bp, Homo sapiens
acaactaaaaatccc

SEQ ID NO: 35668 - DNA, 15 bp, Homo sapiens
caactaaaaatcccc

SEQ ID NO: 35669 - DNA, 15 bp, Homo sapiens
aactaaaaatcccca

SEQ ID NO: 35670 - DNA, 15 bp, Homo sapiens
actaaaaatccccac

SEQ ID NO: 35671 - DNA, 15 bp, Homo sapiens
ctaaaaatccccaca

SEQ ID NO: 35672 - DNA, 15 bp, Homo sapiens
taaaaatccccacag

SEQ ID NO: 35673 - DNA, 15 bp, Homo sapiens
aaaaatccccacaga

SEQ ID NO: 35674 - DNA, 15 bp, Homo sapiens
aaaatccccacagaa

SEQ ID NO: 35675 - DNA, 15 bp, Homo sapiens
aaatccccacagaag

SEQ ID NO: 35676 - DNA, 15 bp, Homo sapiens
aatccccacagaaga

SEQ ID NO: 35677 - DNA, 15 bp, Homo sapiens
atccccacagaagat

SEQ ID NO: 35678 - DNA, 15 bp, Homo sapiens
tccccacagaagatg

SEQ ID NO: 35679 - DNA, 15 bp, Homo sapiens
ccccacagaagatga

SEQ ID NO: 35680 - DNA, 15 bp, Homo sapiens
cccacagaagatgaa

SEQ ID NO: 35681 - DNA, 15 bp, Homo sapiens
ccacagaagatgaaa

SEQ ID NO: 35682 - DNA, 15 bp, Homo sapiens
cacagaagatgaaac

SEQ ID NO: 35683 - DNA, 15 bp, Homo sapiens
acagaagatgaaaca

SEQ ID NO: 35684 - DNA, 15 bp, Homo sapiens
cagaagatgaaacag

SEQ ID NO: 35685 - DNA, 15 bp, Homo sapiens
agaagatgaaacaga

SEQ ID NO: 35686 - DNA, 15 bp, Homo sapiens
gaagatgaaacagag

SEQ ID NO: 35687 - DNA, 15 bp, Homo sapiens
aagatgaaacagagc

SEQ ID NO: 35688 - DNA, 15 bp, Homo sapiens
agatgaaacagagcc

SEQ ID NO: 35689 - DNA, 15 bp, Homo sapiens
gatgaaacagagccg

SEQ ID NO: 35690 - DNA, 15 bp, Homo sapiens
atgaaacagagccgt

SEQ ID NO: 35691 - DNA, 15 bp, Homo sapiens
tgaaacagagccgta

SEQ ID NO: 35692 - DNA, 15 bp, Homo sapiens
gaaacagagccgtat

SEQ ID NO: 35693 - DNA, 15 bp, Homo sapiens
aaacagagccgtatc

SEQ ID NO: 35694 - DNA, 15 bp, Homo sapiens
aacagagccgtatct

SEQ ID NO: 35695 - DNA, 15 bp, Homo sapiens
acagagccgtatctt

SEQ ID NO: 35696 - DNA, 15 bp, Homo sapiens
cagagccgtatcttc

SEQ ID NO: 35697 - DNA, 15 bp, Homo sapiens
agagccgtatcttct

SEQ ID NO: 35698 - DNA, 15 bp, Homo sapiens
gagccgtatcttctt

SEQ ID NO: 35699 - DNA, 15 bp, Homo sapiens
agccgtatcttcttt

SEQ ID NO: 35700 - DNA, 15 bp, Homo sapiens
gccgtatcttcttta

SEQ ID NO: 35701 - DNA, 15 bp, Homo sapiens
ccgtatcttctttaa

SEQ ID NO: 35702 - DNA, 15 bp, Homo sapiens
cgtatcttctttaaa

SEQ ID NO: 35703 - DNA, 15 bp, Homo sapiens
gtatcttctttaaag

SEQ ID NO: 35704 - DNA, 15 bp, Homo sapiens
tatcttctttaaagc

SEQ ID NO: 35705 - DNA, 15 bp, Homo sapiens
atcttctttaaagct

SEQ ID NO: 35706 - DNA, 15 bp, Homo sapiens
tcttctttaaagctc

SEQ ID NO: 35707 - DNA, 15 bp, Homo sapiens
cttctttaaagctca

SEQ ID NO: 35708 - DNA, 15 bp, Homo sapiens
ttctttaaagctcaa

SEQ ID NO: 35709 - DNA, 15 bp, Homo sapiens
tctttaaagctcaac

SEQ ID NO: 35710 - DNA, 15 bp, Homo sapiens
ctttaaagctcaact

SEQ ID NO: 35711 - DNA, 15 bp, Homo sapiens
tttaaagctcaactt

SEQ ID NO: 35712 - DNA, 15 bp, Homo sapiens
ttaaagctcaacttt

SEQ ID NO: 35713 - DNA, 15 bp, Homo sapiens
taaagctcaacttta

SEQ ID NO: 35714 - DNA, 15 bp, Homo sapiens
aaagctcaactttag

SEQ ID NO: 35715 - DNA, 15 bp, Homo sapiens
aagctcaactttaga

SEQ ID NO: 35716 - DNA, 15 bp, Homo sapiens
agctcaactttagac

SEQ ID NO: 35717 - DNA, 15 bp, Homo sapiens
gctcaactttagact

SEQ ID NO: 35718 - DNA, 15 bp, Homo sapiens
ctcaactttagacta

SEQ ID NO: 35719 - DNA, 15 bp, Homo sapiens
tcaactttagactaa

SEQ ID NO: 35720 - DNA, 15 bp, Homo sapiens
caactttagactaat

SEQ ID NO: 35721 - DNA, 15 bp, Homo sapiens
aactttagactaatc

SEQ ID NO: 35722 - DNA, 15 bp, Homo sapiens
actttagactaatcc

SEQ ID NO: 35723 - DNA, 15 bp, Homo sapiens
ctttagactaatcca

SEQ ID NO: 35724 - DNA, 15 bp, Homo sapiens
tttagactaatccaa

SEQ ID NO: 35725 - DNA, 15 bp, Homo sapiens
ttagactaatccaaa

SEQ ID NO: 35726 - DNA, 15 bp, Homo sapiens
tagactaatccaaac

SEQ ID NO: 35727 - DNA, 15 bp, Homo sapiens
agactaatccaaact

SEQ ID NO: 35728 - DNA, 15 bp, Homo sapiens
gactaatccaaacta

SEQ ID NO: 35729 - DNA, 15 bp, Homo sapiens
actaatccaaactaa

SEQ ID NO: 35730 - DNA, 15 bp, Homo sapiens
ctaatccaaactaat

SEQ ID NO: 35731 - DNA, 15 bp, Homo sapiens
taatccaaactaatt

SEQ ID NO: 35732 - DNA, 15 bp, Homo sapiens
aatccaaactaatta

SEQ ID NO: 35733 - DNA, 15 bp, Homo sapiens
atccaaactaattat

SEQ ID NO: 35734 - DNA, 15 bp, Homo sapiens
tccaaactaattata

SEQ ID NO: 35735 - DNA, 15 bp, Homo sapiens
ccaaactaattataa

SEQ ID NO: 35736 - DNA, 15 bp, Homo sapiens
caaactaattataaa

SEQ ID NO: 35737 - DNA, 15 bp, Homo sapiens
aaactaattataaag

SEQ ID NO: 35738 - DNA, 15 bp, Homo sapiens
aactaattataaagt

SEQ ID NO: 35739 - DNA, 15 bp, Homo sapiens
actaattataaagtt

SEQ ID NO: 35740 - DNA, 15 bp, Homo sapiens
ctaattataaagttg

SEQ ID NO: 35741 - DNA, 15 bp, Homo sapiens
taattataaagttga

SEQ ID NO: 35742 - DNA, 15 bp, Homo sapiens
aattataaagttgag

SEQ ID NO: 35743 - DNA, 15 bp, Homo sapiens
attataaagttgaga

SEQ ID NO: 35744 - DNA, 15 bp, Homo sapiens
ttataaagttgagat

SEQ ID NO: 35745 - DNA, 15 bp, Homo sapiens
tataaagttgagatt

SEQ ID NO: 35746 - DNA, 15 bp, Homo sapiens
ataaagttgagattt

SEQ ID NO: 35747 - DNA, 15 bp, Homo sapiens
taaagttgagatttt

SEQ ID NO: 35748 - DNA, 15 bp, Homo sapiens
aaagttgagattttg

SEQ ID NO: 35749 - DNA, 15 bp, Homo sapiens
aagttgagattttgt

SEQ ID NO: 35750 - DNA, 15 bp, Homo sapiens
agttgagattttgtt

SEQ ID NO: 35751 - DNA, 15 bp, Homo sapiens
gttgagattttgttt

SEQ ID NO: 35752 - DNA, 15 bp, Homo sapiens
ttgagattttgtttc

SEQ ID NO: 35753 - DNA, 15 bp, Homo sapiens
tgagattttgtttca

SEQ ID NO: 35754 - DNA, 15 bp, Homo sapiens
gagattttgtttcac

SEQ ID NO: 35755 - DNA, 15 bp, Homo sapiens
agattttgtttcact

SEQ ID NO: 35756 - DNA, 15 bp, Homo sapiens
gattttgtttcactt

SEQ ID NO: 35757 - DNA, 15 bp, Homo sapiens
attttgtttcacttt

SEQ ID NO: 35758 - DNA, 15 bp, Homo sapiens
ttttgtttcactttg

SEQ ID NO: 35759 - DNA, 15 bp, Homo sapiens
tttgtttcactttgc

SEQ ID NO: 35760 - DNA, 15 bp, Homo sapiens
ttgtttcactttgct

SEQ ID NO: 35761 - DNA, 15 bp, Homo sapiens
tgtttcactttgctt

SEQ ID NO: 35762 - DNA, 15 bp, Homo sapiens
gtttcactttgcttt

SEQ ID NO: 35763 - DNA, 15 bp, Homo sapiens
tttcactttgcttta

SEQ ID NO: 35764 - DNA, 15 bp, Homo sapiens
ttcactttgctttaa

SEQ ID NO: 35765 - DNA, 15 bp, Homo sapiens
tcactttgctttaaa

SEQ ID NO: 35766 - DNA, 15 bp, Homo sapiens
cactttgctttaaag

SEQ ID NO: 35767 - DNA, 15 bp, Homo sapiens
actttgctttaaagg

SEQ ID NO: 35768 - DNA, 15 bp, Homo sapiens
ctttgctttaaaggg

SEQ ID NO: 35769 - DNA, 15 bp, Homo sapiens
tttgctttaaagggt

SEQ ID NO: 35770 - DNA, 15 bp, Homo sapiens
ttgctttaaagggta

SEQ ID NO: 35771 - DNA, 15 bp, Homo sapiens
tgctttaaagggtaa

SEQ ID NO: 35772 - DNA, 15 bp, Homo sapiens
gctttaaagggtaat

SEQ ID NO: 35773 - DNA, 15 bp, Homo sapiens
ctttaaagggtaatt

SEQ ID NO: 35774 - DNA, 15 bp, Homo sapiens
tttaaagggtaatta

SEQ ID NO: 35775 - DNA, 15 bp, Homo sapiens
ttaaagggtaattat

SEQ ID NO: 35776 - DNA, 15 bp, Homo sapiens
taaagggtaattatc

SEQ ID NO: 35777 - DNA, 15 bp, Homo sapiens
aaagggtaattatct

SEQ ID NO: 35778 - DNA, 15 bp, Homo sapiens
aagggtaattatcta

SEQ ID NO: 35779 - DNA, 15 bp, Homo sapiens
agggtaattatctag

SEQ ID NO: 35780 - DNA, 15 bp, Homo sapiens
gggtaattatctagt

SEQ ID NO: 35781 - DNA, 15 bp, Homo sapiens
ggtaattatctagta

SEQ ID NO: 35782 - DNA, 15 bp, Homo sapiens
gtaattatctagtac

SEQ ID NO: 35783 - DNA, 15 bp, Homo sapiens
taattatctagtacc

SEQ ID NO: 35784 - DNA, 15 bp, Homo sapiens
aattatctagtacca

SEQ ID NO: 35785 - DNA, 15 bp, Homo sapiens
attatctagtaccat

SEQ ID NO: 35786 - DNA, 15 bp, Homo sapiens
ttatctagtaccatt

SEQ ID NO: 35787 - DNA, 15 bp, Homo sapiens
tatctagtaccattt

SEQ ID NO: 35788 - DNA, 15 bp, Homo sapiens
atctagtaccatttt

SEQ ID NO: 35789 - DNA, 15 bp, Homo sapiens
tctagtaccattttt

SEQ ID NO: 35790 - DNA, 15 bp, Homo sapiens
ctagtaccatttttt

SEQ ID NO: 35791 - DNA, 15 bp, Homo sapiens
tagtaccattttttt

SEQ ID NO: 35792 - DNA, 15 bp, Homo sapiens
agtaccatttttttg

SEQ ID NO: 35793 - DNA, 15 bp, Homo sapiens
gtaccatttttttgt

SEQ ID NO: 35794 - DNA, 15 bp, Homo sapiens
taccatttttttgtg

SEQ ID NO: 35795 - DNA, 15 bp, Homo sapiens
accatttttttgtga

SEQ ID NO: 35796 - DNA, 15 bp, Homo sapiens
ccatttttttgtgat

SEQ ID NO: 35797 - DNA, 15 bp, Homo sapiens
catttttttgtgatg

SEQ ID NO: 35798 - DNA, 15 bp, Homo sapiens
atttttttgtgatgg

SEQ ID NO: 35799 - DNA, 15 bp, Homo sapiens
tttttttgtgatgga

SEQ ID NO: 35800 - DNA, 15 bp, Homo sapiens
ttttttgtgatggat

SEQ ID NO: 35801 - DNA, 15 bp, Homo sapiens
tttttgtgatggatc

SEQ ID NO: 35802 - DNA, 15 bp, Homo sapiens
ttttgtgatggatca

SEQ ID NO: 35803 - DNA, 15 bp, Homo sapiens
tttgtgatggatcac

SEQ ID NO: 35804 - DNA, 15 bp, Homo sapiens
ttgtgatggatcaca

SEQ ID NO: 35805 - DNA, 15 bp, Homo sapiens
tgtgatggatcacaa

SEQ ID NO: 35806 - DNA, 15 bp, Homo sapiens
gtgatggatcacaaa

SEQ ID NO: 35807 - DNA, 15 bp, Homo sapiens
tgatggatcacaaaa

SEQ ID NO: 35808 - DNA, 15 bp, Homo sapiens
gatggatcacaaaaa

SEQ ID NO: 35809 - DNA, 15 bp, Homo sapiens
atggatcacaaaaat

SEQ ID NO: 35810 - DNA, 15 bp, Homo sapiens
tggatcacaaaaatg

SEQ ID NO: 35811 - DNA, 15 bp, Homo sapiens
ggatcacaaaaatgg

SEQ ID NO: 35812 - DNA, 15 bp, Homo sapiens
gatcacaaaaatggg

SEQ ID NO: 35813 - DNA, 15 bp, Homo sapiens
atcacaaaaatgggg

SEQ ID NO: 35814 - DNA, 15 bp, Homo sapiens
tcacaaaaatgggga

SEQ ID NO: 35815 - DNA, 15 bp, Homo sapiens
cacaaaaatggggag

SEQ ID NO: 35816 - DNA, 15 bp, Homo sapiens
acaaaaatggggagg

SEQ ID NO: 35817 - DNA, 15 bp, Homo sapiens
caaaaatggggagga

SEQ ID NO: 35818 - DNA, 15 bp, Homo sapiens
aaaaatggggaggag

SEQ ID NO: 35819 - DNA, 15 bp, Homo sapiens
aaaatggggaggagg

SEQ ID NO: 35820 - DNA, 15 bp, Homo sapiens
aaatggggaggagga

SEQ ID NO: 35821 - DNA, 15 bp, Homo sapiens
aatggggaggaggaa

SEQ ID NO: 35822 - DNA, 15 bp, Homo sapiens
atggggaggaggaaa

SEQ ID NO: 35823 - DNA, 15 bp, Homo sapiens
tggggaggaggaaag

SEQ ID NO: 35824 - DNA, 15 bp, Homo sapiens
ggggaggaggaaaga

SEQ ID NO: 35825 - DNA, 15 bp, Homo sapiens
gggaggaggaaagaa

SEQ ID NO: 35826 - DNA, 15 bp, Homo sapiens
ggaggaggaaagaaa

SEQ ID NO: 35827 - DNA, 15 bp, Homo sapiens
gaggaggaaagaaat

SEQ ID NO: 35828 - DNA, 15 bp, Homo sapiens
aggaggaaagaaatc

SEQ ID NO: 35829 - DNA, 15 bp, Homo sapiens
ggaggaaagaaatca

SEQ ID NO: 35830 - DNA, 15 bp, Homo sapiens
gaggaaagaaatcaa

SEQ ID NO: 35831 - DNA, 15 bp, Homo sapiens
aggaaagaaatcaag

SEQ ID NO: 35832 - DNA, 15 bp, Homo sapiens
ggaaagaaatcaaga

SEQ ID NO: 35833 - DNA, 15 bp, Homo sapiens
gaaagaaatcaagat

SEQ ID NO: 35834 - DNA, 15 bp, Homo sapiens
aaagaaatcaagatt

SEQ ID NO: 35835 - DNA, 15 bp, Homo sapiens
aagaaatcaagattt

SEQ ID NO: 35836 - DNA, 15 bp, Homo sapiens
agaaatcaagattta

SEQ ID NO: 35837 - DNA, 15 bp, Homo sapiens
gaaatcaagatttac

SEQ ID NO: 35838 - DNA, 15 bp, Homo sapiens
aaatcaagatttact

SEQ ID NO: 35839 - DNA, 15 bp, Homo sapiens
aatcaagatttactg

SEQ ID NO: 35840 - DNA, 15 bp, Homo sapiens
atcaagatttactga

SEQ ID NO: 35841 - DNA, 15 bp, Homo sapiens
tcaagatttactgaa

SEQ ID NO: 35842 - DNA, 15 bp, Homo sapiens
caagatttactgaac

SEQ ID NO: 35843 - DNA, 15 bp, Homo sapiens
aagatttactgaaca

SEQ ID NO: 35844 - DNA, 15 bp, Homo sapiens
agatttactgaacac

SEQ ID NO: 35845 - DNA, 15 bp, Homo sapiens
gatttactgaacacc

SEQ ID NO: 35846 - DNA, 15 bp, Homo sapiens
atttactgaacaccc

SEQ ID NO: 35847 - DNA, 15 bp, Homo sapiens
tttactgaacacccg

SEQ ID NO: 35848 - DNA, 15 bp, Homo sapiens
ttactgaacacccgt

SEQ ID NO: 35849 - DNA, 15 bp, Homo sapiens
tactgaacacccgtt

SEQ ID NO: 35850 - DNA, 15 bp, Homo sapiens
actgaacacccgtta

SEQ ID NO: 35851 - DNA, 15 bp, Homo sapiens
ctgaacacccgttat

SEQ ID NO: 35852 - DNA, 15 bp, Homo sapiens
tgaacacccgttatc

SEQ ID NO: 35853 - DNA, 15 bp, Homo sapiens
gaacacccgttatct

SEQ ID NO: 35854 - DNA, 15 bp, Homo sapiens
aacacccgttatctt

SEQ ID NO: 35855 - DNA, 15 bp, Homo sapiens
acacccgttatcttt

SEQ ID NO: 35856 - DNA, 15 bp, Homo sapiens
cacccgttatctttg

SEQ ID NO: 35857 - DNA, 15 bp, Homo sapiens
acccgttatctttga

SEQ ID NO: 35858 - DNA, 15 bp, Homo sapiens
cccgttatctttgaa

SEQ ID NO: 35859 - DNA, 15 bp, Homo sapiens
ccgttatctttgaag

SEQ ID NO: 35860 - DNA, 15 bp, Homo sapiens
cgttatctttgaaga

SEQ ID NO: 35861 - DNA, 15 bp, Homo sapiens
gttatctttgaagaa

SEQ ID NO: 35862 - DNA, 15 bp, Homo sapiens
ttatctttgaagaaa

SEQ ID NO: 35863 - DNA, 15 bp, Homo sapiens
tatctttgaagaaat

SEQ ID NO: 35864 - DNA, 15 bp, Homo sapiens
atctttgaagaaatc

SEQ ID NO: 35865 - DNA, 15 bp, Homo sapiens
tctttgaagaaatca

SEQ ID NO: 35866 - DNA, 15 bp, Homo sapiens
ctttgaagaaatcaa

SEQ ID NO: 35867 - DNA, 15 bp, Homo sapiens
tttgaagaaatcaag

SEQ ID NO: 35868 - DNA, 15 bp, Homo sapiens
ttgaagaaatcaaga

SEQ ID NO: 35869 - DNA, 15 bp, Homo sapiens
tgaagaaatcaagat

SEQ ID NO: 35870 - DNA, 15 bp, Homo sapiens
gaagaaatcaagatt

SEQ ID NO: 35871 - DNA, 15 bp, Homo sapiens
caagatttactgaat

SEQ ID NO: 35872 - DNA, 15 bp, Homo sapiens
aagatttactgaata

SEQ ID NO: 35873 - DNA, 15 bp, Homo sapiens
agatttactgaatac

SEQ ID NO: 35874 - DNA, 15 bp, Homo sapiens
gatttactgaatacc

SEQ ID NO: 35875 - DNA, 15 bp, Homo sapiens
atttactgaataccc

SEQ ID NO: 35876 - DNA, 15 bp, Homo sapiens
tttactgaatacccg

SEQ ID NO: 35877 - DNA, 15 bp, Homo sapiens
ttactgaatacccgt

SEQ ID NO: 35878 - DNA, 15 bp, Homo sapiens
tactgaatacccgtt

SEQ ID NO: 35879 - DNA, 15 bp, Homo sapiens
actgaatacccgtta

SEQ ID NO: 35880 - DNA, 15 bp, Homo sapiens
ctgaatacccgttat

SEQ ID NO: 35881 - DNA, 15 bp, Homo sapiens
tgaatacccgttatc

SEQ ID NO: 35882 - DNA, 15 bp, Homo sapiens
gaatacccgttatct

SEQ ID NO: 35883 - DNA, 15 bp, Homo sapiens
aatacccgttatctt

SEQ ID NO: 35884 - DNA, 15 bp, Homo sapiens
atacccgttatcttc

SEQ ID NO: 35885 - DNA, 15 bp, Homo sapiens
tacccgttatcttcg

SEQ ID NO: 35886 - DNA, 15 bp, Homo sapiens
acccgttatcttcga

SEQ ID NO: 35887 - DNA, 15 bp, Homo sapiens
cccgttatcttcgaa

SEQ ID NO: 35888 - DNA, 15 bp, Homo sapiens
ccgttatcttcgaag

SEQ ID NO: 35889 - DNA, 15 bp, Homo sapiens
cgttatcttcgaagc

SEQ ID NO: 35890 - DNA, 15 bp, Homo sapiens
gttatcttcgaagct

SEQ ID NO: 35891 - DNA, 15 bp, Homo sapiens
ttatcttcgaagctc

SEQ ID NO: 35892 - DNA, 15 bp, Homo sapiens
tatcttcgaagctct

SEQ ID NO: 35893 - DNA, 15 bp, Homo sapiens
atcttcgaagctctg

SEQ ID NO: 35894 - DNA, 15 bp, Homo sapiens
tcttcgaagctctga

SEQ ID NO: 35895 - DNA, 15 bp, Homo sapiens
cttcgaagctctgaa

SEQ ID NO: 35896 - DNA, 15 bp, Homo sapiens
ttcgaagctctgaaa

SEQ ID NO: 35897 - DNA, 15 bp, Homo sapiens
tcgaagctctgaaaa

SEQ ID NO: 35898 - DNA, 15 bp, Homo sapiens
cgaagctctgaaaaa

SEQ ID NO: 35899 - DNA, 15 bp, Homo sapiens
gaagctctgaaaaag

SEQ ID NO: 35900 - DNA, 15 bp, Homo sapiens
aagctctgaaaaagg

SEQ ID NO: 35901 - DNA, 15 bp, Homo sapiens
agctctgaaaaaggc

SEQ ID NO: 35902 - DNA, 15 bp, Homo sapiens
gctctgaaaaaggcc

SEQ ID NO: 35903 - DNA, 15 bp, Homo sapiens
ctctgaaaaaggcct

SEQ ID NO: 35904 - DNA, 15 bp, Homo sapiens
tctgaaaaaggcctc

SEQ ID NO: 35905 - DNA, 15 bp, Homo sapiens
ctgaaaaaggcctca

SEQ ID NO: 35906 - DNA, 15 bp, Homo sapiens
tgaaaaaggcctcat

SEQ ID NO: 35907 - DNA, 15 bp, Homo sapiens
gaaaaaggcctcatt

SEQ ID NO: 35908 - DNA, 15 bp, Homo sapiens
aaaaaggcctcattt

SEQ ID NO: 35909 - DNA, 15 bp, Homo sapiens
aaaaggcctcatttt

SEQ ID NO: 35910 - DNA, 15 bp, Homo sapiens
aaaggcctcattttt

SEQ ID NO: 35911 - DNA, 15 bp, Homo sapiens
aaggcctcatttttc

SEQ ID NO: 35912 - DNA, 15 bp, Homo sapiens
aggcctcatttttca

SEQ ID NO: 35913 - DNA, 15 bp, Homo sapiens
ggcctcatttttcag

SEQ ID NO: 35914 - DNA, 15 bp, Homo sapiens
gcctcatttttcaga

SEQ ID NO: 35915 - DNA, 15 bp, Homo sapiens
cctcatttttcagat

SEQ ID NO: 35916 - DNA, 15 bp, Homo sapiens
ctcatttttcagata

SEQ ID NO: 35917 - DNA, 15 bp, Homo sapiens
tcatttttcagataa

SEQ ID NO: 35918 - DNA, 15 bp, Homo sapiens
catttttcagataat

SEQ ID NO: 35919 - DNA, 15 bp, Homo sapiens
atttttcagataatg

SEQ ID NO: 35920 - DNA, 15 bp, Homo sapiens
tttttcagataatgg

SEQ ID NO: 35921 - DNA, 15 bp, Homo sapiens
ttttcagataatgga

SEQ ID NO: 35922 - DNA, 15 bp, Homo sapiens
tttcagataatggaa

SEQ ID NO: 35923 - DNA, 15 bp, Homo sapiens
ttcagataatggaat

SEQ ID NO: 35924 - DNA, 15 bp, Homo sapiens
tcagataatggaatt

SEQ ID NO: 35925 - DNA, 15 bp, Homo sapiens
cagataatggaatta

SEQ ID NO: 35926 - DNA, 15 bp, Homo sapiens
agataatggaattaa

SEQ ID NO: 35927 - DNA, 15 bp, Homo sapiens
gataatggaattaag

SEQ ID NO: 35928 - DNA, 15 bp, Homo sapiens
ataatggaattaagg

SEQ ID NO: 35929 - DNA, 15 bp, Homo sapiens
taatggaattaaggc

SEQ ID NO: 35930 - DNA, 15 bp, Homo sapiens
aatggaattaaggct

SEQ ID NO: 35931 - DNA, 15 bp, Homo sapiens
atggaattaaggctc

SEQ ID NO: 35932 - DNA, 15 bp, Homo sapiens
tggaattaaggctca

SEQ ID NO: 35933 - DNA, 15 bp, Homo sapiens
ggaattaaggctcag

SEQ ID NO: 35934 - DNA, 15 bp, Homo sapiens
gaattaaggctcaga

SEQ ID NO: 35935 - DNA, 15 bp, Homo sapiens
aattaaggctcagaa

SEQ ID NO: 35936 - DNA, 15 bp, Homo sapiens
attaaggctcagaaa

SEQ ID NO: 35937 - DNA, 15 bp, Homo sapiens
ttaaggctcagaaat

SEQ ID NO: 35938 - DNA, 15 bp, Homo sapiens
taaggctcagaaatt

SEQ ID NO: 35939 - DNA, 15 bp, Homo sapiens
aaggctcagaaattc

SEQ ID NO: 35940 - DNA, 15 bp, Homo sapiens
aggctcagaaattca

SEQ ID NO: 35941 - DNA, 15 bp, Homo sapiens
ggctcagaaattcag

SEQ ID NO: 35942 - DNA, 15 bp, Homo sapiens
gctcagaaattcagt

SEQ ID NO: 35943 - DNA, 15 bp, Homo sapiens
ctcagaaattcagta

SEQ ID NO: 35944 - DNA, 15 bp, Homo sapiens
tcagaaattcagtag

SEQ ID NO: 35945 - DNA, 15 bp, Homo sapiens
cagaaattcagtagg

SEQ ID NO: 35946 - DNA, 15 bp, Homo sapiens
agaaattcagtaggc

SEQ ID NO: 35947 - DNA, 15 bp, Homo sapiens
gaaattcagtaggct

SEQ ID NO: 35948 - DNA, 15 bp, Homo sapiens
aaattcagtaggcta

SEQ ID NO: 35949 - DNA, 15 bp, Homo sapiens
aattcagtaggctat

SEQ ID NO: 35950 - DNA, 15 bp, Homo sapiens
attcagtaggctatc

SEQ ID NO: 35951 - DNA, 15 bp, Homo sapiens
ttcagtaggctatca

SEQ ID NO: 35952 - DNA, 15 bp, Homo sapiens
tcagtaggctatcaa

SEQ ID NO: 35953 - DNA, 15 bp, Homo sapiens
cagtaggctatcaaa

SEQ ID NO: 35954 - DNA, 15 bp, Homo sapiens
agtaggctatcaaac

SEQ ID NO: 35955 - DNA, 15 bp, Homo sapiens
gtaggctatcaaact

SEQ ID NO: 35956 - DNA, 15 bp, Homo sapiens
taggctatcaaactc

SEQ ID NO: 35957 - DNA, 15 bp, Homo sapiens
aggctatcaaactca

SEQ ID NO: 35958 - DNA, 15 bp, Homo sapiens
ggctatcaaactcac

SEQ ID NO: 35959 - DNA, 15 bp, Homo sapiens
gctatcaaactcaca

SEQ ID NO: 35960 - DNA, 15 bp, Homo sapiens
ctatcaaactcacac

SEQ ID NO: 35961 - DNA, 15 bp, Homo sapiens
tatcaaactcacaca

SEQ ID NO: 35962 - DNA, 15 bp, Homo sapiens
atcaaactcacacaa

SEQ ID NO: 35963 - DNA, 15 bp, Homo sapiens
tcaaactcacacaac

SEQ ID NO: 35964 - DNA, 15 bp, Homo sapiens
caaactcacacaact

SEQ ID NO: 35965 - DNA, 15 bp, Homo sapiens
aaactcacacaactc

SEQ ID NO: 35966 - DNA, 15 bp, Homo sapiens
aactcacacaactca

SEQ ID NO: 35967 - DNA, 15 bp, Homo sapiens
actcacacaactcag

SEQ ID NO: 35968 - DNA, 15 bp, Homo sapiens
ctcacacaactcagc

SEQ ID NO: 35969 - DNA, 15 bp, Homo sapiens
tcacacaactcagca

SEQ ID NO: 35970 - DNA, 15 bp, Homo sapiens
cacacaactcagcaa

SEQ ID NO: 35971 - DNA, 15 bp, Homo sapiens
acacaactcagcaat

SEQ ID NO: 35972 - DNA, 15 bp, Homo sapiens
cacaactcagcaatt

SEQ ID NO: 35973 - DNA, 15 bp, Homo sapiens
acaactcagcaatta

SEQ ID NO: 35974 - DNA, 15 bp, Homo sapiens
caactcagcaattaa

SEQ ID NO: 35975 - DNA, 15 bp, Homo sapiens
aactcagcaattaaa

SEQ ID NO: 35976 - DNA, 15 bp, Homo sapiens
actcagcaattaaaa

SEQ ID NO: 35977 - DNA, 15 bp, Homo sapiens
ctcagcaattaaaac

SEQ ID NO: 35978 - DNA, 15 bp, Homo sapiens
tcagcaattaaaacc

SEQ ID NO: 35979 - DNA, 15 bp, Homo sapiens
cagcaattaaaacca

SEQ ID NO: 35980 - DNA, 15 bp, Homo sapiens
agcaattaaaaccat

SEQ ID NO: 35981 - DNA, 15 bp, Homo sapiens
gcaattaaaaccatg

SEQ ID NO: 35982 - DNA, 15 bp, Homo sapiens
caattaaaaccatgt

SEQ ID NO: 35983 - DNA, 15 bp, Homo sapiens
aattaaaaccatgtt

SEQ ID NO: 35984 - DNA, 15 bp, Homo sapiens
attaaaaccatgttt

SEQ ID NO: 35985 - DNA, 15 bp, Homo sapiens
ttaaaaccatgtttc

SEQ ID NO: 35986 - DNA, 15 bp, Homo sapiens
taaaaccatgtttct

SEQ ID NO: 35987 - DNA, 15 bp, Homo sapiens
aaaaccatgtttctc

SEQ ID NO: 35988 - DNA, 15 bp, Homo sapiens
aaaccatgtttctct

SEQ ID NO: 35989 - DNA, 15 bp, Homo sapiens
aaccatgtttctctg

SEQ ID NO: 35990 - DNA, 15 bp, Homo sapiens
accatgtttctctgg

SEQ ID NO: 35991 - DNA, 15 bp, Homo sapiens
ccatgtttctctggt

SEQ ID NO: 35992 - DNA, 15 bp, Homo sapiens
catgtttctctggtc

SEQ ID NO: 35993 - DNA, 15 bp, Homo sapiens
atgtttctctggtct

SEQ ID NO: 35994 - DNA, 15 bp, Homo sapiens
tgtttctctggtctt

SEQ ID NO: 35995 - DNA, 15 bp, Homo sapiens
gtttctctggtcttt

SEQ ID NO: 35996 - DNA, 15 bp, Homo sapiens
tttctctggtctttt

SEQ ID NO: 35997 - DNA, 15 bp, Homo sapiens
ttctctggtcttttc

SEQ ID NO: 35998 - DNA, 15 bp, Homo sapiens
tctctggtcttttct

SEQ ID NO: 35999 - DNA, 15 bp, Homo sapiens
ctctggtcttttcta

SEQ ID NO: 36000 - DNA, 15 bp, Homo sapiens
tctggtcttttctac

SEQ ID NO: 36001 - DNA, 15 bp, Homo sapiens
ctggtcttttctaca

SEQ ID NO: 36002 - DNA, 15 bp, Homo sapiens
tggtcttttctacac

SEQ ID NO: 36003 - DNA, 15 bp, Homo sapiens
ggtcttttctacact

SEQ ID NO: 36004 - DNA, 15 bp, Homo sapiens
gtcttttctacactg

SEQ ID NO: 36005 - DNA, 15 bp, Homo sapiens
tcttttctacactga

SEQ ID NO: 36006 - DNA, 15 bp, Homo sapiens
cttttctacactgat

SEQ ID NO: 36007 - DNA, 15 bp, Homo sapiens
ttttctacactgata

SEQ ID NO: 36008 - DNA, 15 bp, Homo sapiens
tttctacactgataa

SEQ ID NO: 36009 - DNA, 15 bp, Homo sapiens
ttctacactgataaa

SEQ ID NO: 36010 - DNA, 15 bp, Homo sapiens
tctacactgataaac

SEQ ID NO: 36011 - DNA, 15 bp, Homo sapiens
ctacactgataaact

SEQ ID NO: 36012 - DNA, 15 bp, Homo sapiens
tacactgataaacta

SEQ ID NO: 36013 - DNA, 15 bp, Homo sapiens
acactgataaactat

SEQ ID NO: 36014 - DNA, 15 bp, Homo sapiens
cactgataaactata

SEQ ID NO: 36015 - DNA, 15 bp, Homo sapiens
actgataaactatat

SEQ ID NO: 36016 - DNA, 15 bp, Homo sapiens
ctgataaactatatc

SEQ ID NO: 36017 - DNA, 15 bp, Homo sapiens
tgataaactatatcc

SEQ ID NO: 36018 - DNA, 15 bp, Homo sapiens
gataaactatatcca

SEQ ID NO: 36019 - DNA, 15 bp, Homo sapiens
ataaactatatccac

SEQ ID NO: 36020 - DNA, 15 bp, Homo sapiens
taaactatatccaca

SEQ ID NO: 36021 - DNA, 15 bp, Homo sapiens
aaactatatccacat

SEQ ID NO: 36022 - DNA, 15 bp, Homo sapiens
aactatatccacatg

SEQ ID NO: 36023 - DNA, 15 bp, Homo sapiens
actatatccacatgt

SEQ ID NO: 36024 - DNA, 15 bp, Homo sapiens
ctatatccacatgtt

SEQ ID NO: 36025 - DNA, 15 bp, Homo sapiens
tatatccacatgttt

SEQ ID NO: 36026 - DNA, 15 bp, Homo sapiens
atatccacatgttta

SEQ ID NO: 36027 - DNA, 15 bp, Homo sapiens
tatccacatgtttaa

SEQ ID NO: 36028 - DNA, 15 bp, Homo sapiens
atccacatgtttaag

SEQ ID NO: 36029 - DNA, 15 bp, Homo sapiens
tccacatgtttaagt

SEQ ID NO: 36030 - DNA, 15 bp, Homo sapiens
ccacatgtttaagta

SEQ ID NO: 36031 - DNA, 15 bp, Homo sapiens
cacatgtttaagtat

SEQ ID NO: 36032 - DNA, 15 bp, Homo sapiens
acatgtttaagtatt

SEQ ID NO: 36033 - DNA, 15 bp, Homo sapiens
catgtttaagtattt

SEQ ID NO: 36034 - DNA, 15 bp, Homo sapiens
atgtttaagtatttg

SEQ ID NO: 36035 - DNA, 15 bp, Homo sapiens
tgtttaagtatttgt

SEQ ID NO: 36036 - DNA, 15 bp, Homo sapiens
gtttaagtatttgta

SEQ ID NO: 36037 - DNA, 15 bp, Homo sapiens
tttaagtatttgtat

SEQ ID NO: 36038 - DNA, 15 bp, Homo sapiens
ttaagtatttgtatt

SEQ ID NO: 36039 - DNA, 15 bp, Homo sapiens
taagtatttgtattc

SEQ ID NO: 36040 - DNA, 15 bp, Homo sapiens
aagtatttgtattca

SEQ ID NO: 36041 - DNA, 15 bp, Homo sapiens
agtatttgtattcaa

SEQ ID NO: 36042 - DNA, 15 bp, Homo sapiens
gtatttgtattcaac

SEQ ID NO: 36043 - DNA, 15 bp, Homo sapiens
tatttgtattcaaca

SEQ ID NO: 36044 - DNA, 15 bp, Homo sapiens
atttgtattcaacaa

SEQ ID NO: 36045 - DNA, 15 bp, Homo sapiens
tttgtattcaacaaa

SEQ ID NO: 36046 - DNA, 15 bp, Homo sapiens
ttgtattcaacaaag

SEQ ID NO: 36047 - DNA, 15 bp, Homo sapiens
tgtattcaacaaaga

SEQ ID NO: 36048 - DNA, 15 bp, Homo sapiens
gtattcaacaaagaa

SEQ ID NO: 36049 - DNA, 15 bp, Homo sapiens
tattcaacaaagaat

SEQ ID NO: 36050 - DNA, 15 bp, Homo sapiens
attcaacaaagaatc

SEQ ID NO: 36051 - DNA, 15 bp, Homo sapiens
ttcaacaaagaatcc

SEQ ID NO: 36052 - DNA, 15 bp, Homo sapiens
tcaacaaagaatcca

SEQ ID NO: 36053 - DNA, 15 bp, Homo sapiens
caacaaagaatccac

SEQ ID NO: 36054 - DNA, 15 bp, Homo sapiens
aacaaagaatccacc

SEQ ID NO: 36055 - DNA, 15 bp, Homo sapiens
acaaagaatccacca

SEQ ID NO: 36056 - DNA, 15 bp, Homo sapiens
caaagaatccaccat

SEQ ID NO: 36057 - DNA, 15 bp, Homo sapiens
aaagaatccaccatt

SEQ ID NO: 36058 - DNA, 15 bp, Homo sapiens
aagaatccaccattt

SEQ ID NO: 36059 - DNA, 15 bp, Homo sapiens
agaatccaccatttc

SEQ ID NO: 36060 - DNA, 15 bp, Homo sapiens
gaatccaccatttcc

SEQ ID NO: 36061 - DNA, 15 bp, Homo sapiens
aatccaccatttcct

SEQ ID NO: 36062 - DNA, 15 bp, Homo sapiens
atccaccatttcctt

SEQ ID NO: 36063 - DNA, 15 bp, Homo sapiens
tccaccatttccttt

SEQ ID NO: 36064 - DNA, 15 bp, Homo sapiens
ccaccatttcctttt

SEQ ID NO: 36065 - DNA, 15 bp, Homo sapiens
caccatttccttttg

SEQ ID NO: 36066 - DNA, 15 bp, Homo sapiens
accatttccttttgt

SEQ ID NO: 36067 - DNA, 15 bp, Homo sapiens
ccatttccttttgtg

SEQ ID NO: 36068 - DNA, 15 bp, Homo sapiens
catttccttttgtga

SEQ ID NO: 36069 - DNA, 15 bp, Homo sapiens
atttccttttgtgag

SEQ ID NO: 36070 - DNA, 15 bp, Homo sapiens
tttccttttgtgagc

SEQ ID NO: 36071 - DNA, 15 bp, Homo sapiens
ttccttttgtgagcc

SEQ ID NO: 36072 - DNA, 15 bp, Homo sapiens
tccttttgtgagcca

SEQ ID NO: 36073 - DNA, 15 bp, Homo sapiens
ccttttgtgagccag

SEQ ID NO: 36074 - DNA, 15 bp, Homo sapiens
cttttgtgagccagt

SEQ ID NO: 36075 - DNA, 15 bp, Homo sapiens
ttttgtgagccagta

SEQ ID NO: 36076 - DNA, 15 bp, Homo sapiens
tttgtgagccagtaa

SEQ ID NO: 36077 - DNA, 15 bp, Homo sapiens
ttgtgagccagtaac

SEQ ID NO: 36078 - DNA, 15 bp, Homo sapiens
tgtgagccagtaact

SEQ ID NO: 36079 - DNA, 15 bp, Homo sapiens
gtgagccagtaacta

SEQ ID NO: 36080 - DNA, 15 bp, Homo sapiens
tgagccagtaactat

SEQ ID NO: 36081 - DNA, 15 bp, Homo sapiens
gagccagtaactatc

SEQ ID NO: 36082 - DNA, 15 bp, Homo sapiens
agccagtaactatcc

SEQ ID NO: 36083 - DNA, 15 bp, Homo sapiens
gccagtaactatcca

SEQ ID NO: 36084 - DNA, 15 bp, Homo sapiens
ccagtaactatccat

SEQ ID NO: 36085 - DNA, 15 bp, Homo sapiens
cagtaactatccata

SEQ ID NO: 36086 - DNA, 15 bp, Homo sapiens
agtaactatccataa

SEQ ID NO: 36087 - DNA, 15 bp, Homo sapiens
gtaactatccataaa

SEQ ID NO: 36088 - DNA, 15 bp, Homo sapiens
taactatccataaaa

SEQ ID NO: 36089 - DNA, 15 bp, Homo sapiens
aactatccataaaaa

SEQ ID NO: 36090 - DNA, 15 bp, Homo sapiens
actatccataaaaaa

SEQ ID NO: 36091 - DNA, 15 bp, Homo sapiens
ctatccataaaaaac

SEQ ID NO: 36092 - DNA, 15 bp, Homo sapiens
tatccataaaaaact

SEQ ID NO: 36093 - DNA, 15 bp, Homo sapiens
atccataaaaaacta

SEQ ID NO: 36094 - DNA, 15 bp, Homo sapiens
tccataaaaaactat

SEQ ID NO: 36095 - DNA, 15 bp, Homo sapiens
ccataaaaaactatc

SEQ ID NO: 36096 - DNA, 15 bp, Homo sapiens
cataaaaaactatct

SEQ ID NO: 36097 - DNA, 15 bp, Homo sapiens
ataaaaaactatctg

SEQ ID NO: 36098 - DNA, 15 bp, Homo sapiens
taaaaaactatctgc

SEQ ID NO: 36099 - DNA, 15 bp, Homo sapiens
aaaaaactatctgct

SEQ ID NO: 36100 - DNA, 15 bp, Homo sapiens
aaaaactatctgctg

SEQ ID NO: 36101 - DNA, 15 bp, Homo sapiens
aaaactatctgctga

SEQ ID NO: 36102 - DNA, 15 bp, Homo sapiens
aaactatctgctgat

SEQ ID NO: 36103 - DNA, 15 bp, Homo sapiens
aactatctgctgatg

SEQ ID NO: 36104 - DNA, 15 bp, Homo sapiens
actatctgctgatga

SEQ ID NO: 36105 - DNA, 15 bp, Homo sapiens
ctatctgctgatgat

SEQ ID NO: 36106 - DNA, 15 bp, Homo sapiens
tatctgctgatgatt

SEQ ID NO: 36107 - DNA, 15 bp, Homo sapiens
atctgctgatgatta

SEQ ID NO: 36108 - DNA, 15 bp, Homo sapiens
tctgctgatgattaa

SEQ ID NO: 36109 - DNA, 15 bp, Homo sapiens
ctgctgatgattaat

SEQ ID NO: 36110 - DNA, 15 bp, Homo sapiens
tgctgatgattaatt

SEQ ID NO: 36111 - DNA, 15 bp, Homo sapiens
gctgatgattaattt

SEQ ID NO: 36112 - DNA, 15 bp, Homo sapiens
ctgatgattaattta

SEQ ID NO: 36113 - DNA, 15 bp, Homo sapiens
tgatgattaatttaa

SEQ ID NO: 36114 - DNA, 15 bp, Homo sapiens
gatgattaatttaag

SEQ ID NO: 36115 - DNA, 15 bp, Homo sapiens
atgattaatttaagt

SEQ ID NO: 36116 - DNA, 15 bp, Homo sapiens
tgattaatttaagtc

SEQ ID NO: 36117 - DNA, 15 bp, Homo sapiens
gattaatttaagtca

SEQ ID NO: 36118 - DNA, 15 bp, Homo sapiens
attaatttaagtcac

SEQ ID NO: 36119 - DNA, 15 bp, Homo sapiens
ttaatttaagtcacc

SEQ ID NO: 36120 - DNA, 15 bp, Homo sapiens
taatttaagtcaccg

SEQ ID NO: 36121 - DNA, 15 bp, Homo sapiens
aatttaagtcaccga

SEQ ID NO: 36122 - DNA, 15 bp, Homo sapiens
atttaagtcaccgac

SEQ ID NO: 36123 - DNA, 15 bp, Homo sapiens
tttaagtcaccgact

SEQ ID NO: 36124 - DNA, 15 bp, Homo sapiens
ttaagtcaccgactg

SEQ ID NO: 36125 - DNA, 15 bp, Homo sapiens
taagtcaccgactgc

SEQ ID NO: 36126 - DNA, 15 bp, Homo sapiens
aagtcaccgactgct

SEQ ID NO: 36127 - DNA, 15 bp, Homo sapiens
agtcaccgactgctg

SEQ ID NO: 36128 - DNA, 15 bp, Homo sapiens
gtcaccgactgctga

SEQ ID NO: 36129 - DNA, 15 bp, Homo sapiens
tcaccgactgctgat

SEQ ID NO: 36130 - DNA, 15 bp, Homo sapiens
caccgactgctgata

SEQ ID NO: 36131 - DNA, 15 bp, Homo sapiens
accgactgctgatat

SEQ ID NO: 36132 - DNA, 15 bp, Homo sapiens
ccgactgctgatatt

SEQ ID NO: 36133 - DNA, 15 bp, Homo sapiens
cgactgctgatatta

SEQ ID NO: 36134 - DNA, 15 bp, Homo sapiens
gactgctgatattac

SEQ ID NO: 36135 - DNA, 15 bp, Homo sapiens
actgctgatattacc

SEQ ID NO: 36136 - DNA, 15 bp, Homo sapiens
ctgctgatattaccc

SEQ ID NO: 36137 - DNA, 15 bp, Homo sapiens
tgctgatattaccct

SEQ ID NO: 36138 - DNA, 15 bp, Homo sapiens
gctgatattaccctg

SEQ ID NO: 36139 - DNA, 15 bp, Homo sapiens
ctgatattaccctgt

SEQ ID NO: 36140 - DNA, 15 bp, Homo sapiens
tgatattaccctgtt

SEQ ID NO: 36141 - DNA, 15 bp, Homo sapiens
gatattaccctgttc

SEQ ID NO: 36142 - DNA, 15 bp, Homo sapiens
atattaccctgttca

SEQ ID NO: 36143 - DNA, 15 bp, Homo sapiens
tattaccctgttcaa

SEQ ID NO: 36144 - DNA, 15 bp, Homo sapiens
attaccctgttcaaa

SEQ ID NO: 36145 - DNA, 15 bp, Homo sapiens
ttaccctgttcaaac

SEQ ID NO: 36146 - DNA, 15 bp, Homo sapiens
taccctgttcaaacc

SEQ ID NO: 36147 - DNA, 15 bp, Homo sapiens
accctgttcaaaccc

SEQ ID NO: 36148 - DNA, 15 bp, Homo sapiens
ccctgttcaaacccc

SEQ ID NO: 36149 - DNA, 15 bp, Homo sapiens
cctgttcaaaccccc

SEQ ID NO: 36150 - DNA, 15 bp, Homo sapiens
ctgttcaaaccccct

SEQ ID NO: 36151 - DNA, 15 bp, Homo sapiens
tgttcaaacccccta

SEQ ID NO: 36152 - DNA, 15 bp, Homo sapiens
gttcaaaccccctat

SEQ ID NO: 36153 - DNA, 15 bp, Homo sapiens
ttcaaaccccctatc

SEQ ID NO: 36154 - DNA, 15 bp, Homo sapiens
tcaaaccccctatca

SEQ ID NO: 36155 - DNA, 15 bp, Homo sapiens
caaaccccctatcat

SEQ ID NO: 36156 - DNA, 15 bp, Homo sapiens
aaaccccctatcatg

SEQ ID NO: 36157 - DNA, 15 bp, Homo sapiens
aaccccctatcatga

SEQ ID NO: 36158 - DNA, 15 bp, Homo sapiens
accccctatcatgaa

SEQ ID NO: 36159 - DNA, 15 bp, Homo sapiens
ccccctatcatgaat

SEQ ID NO: 36160 - DNA, 15 bp, Homo sapiens
cccctatcatgaata

SEQ ID NO: 36161 - DNA, 15 bp, Homo sapiens
ccctatcatgaatag

SEQ ID NO: 36162 - DNA, 15 bp, Homo sapiens
cctatcatgaatagt

SEQ ID NO: 36163 - DNA, 15 bp, Homo sapiens
ctatcatgaatagtg

SEQ ID NO: 36164 - DNA, 15 bp, Homo sapiens
tatcatgaatagtga

SEQ ID NO: 36165 - DNA, 15 bp, Homo sapiens
atcatgaatagtgag

SEQ ID NO: 36166 - DNA, 15 bp, Homo sapiens
tcatgaatagtgagg

SEQ ID NO: 36167 - DNA, 15 bp, Homo sapiens
catgaatagtgaggt

SEQ ID NO: 36168 - DNA, 15 bp, Homo sapiens
atgaatagtgaggtc

SEQ ID NO: 36169 - DNA, 15 bp, Homo sapiens
tgaatagtgaggtca

SEQ ID NO: 36170 - DNA, 15 bp, Homo sapiens
gaatagtgaggtcaa

SEQ ID NO: 36171 - DNA, 15 bp, Homo sapiens
aatagtgaggtcaat

SEQ ID NO: 36172 - DNA, 15 bp, Homo sapiens
atagtgaggtcaata

SEQ ID NO: 36173 - DNA, 15 bp, Homo sapiens
tagtgaggtcaatac

SEQ ID NO: 36174 - DNA, 15 bp, Homo sapiens
agtgaggtcaatacc

SEQ ID NO: 36175 - DNA, 15 bp, Homo sapiens
gtgaggtcaatacct

SEQ ID NO: 36176 - DNA, 15 bp, Homo sapiens
tgaggtcaataccta

SEQ ID NO: 36177 - DNA, 15 bp, Homo sapiens
gaggtcaatacctaa

SEQ ID NO: 36178 - DNA, 15 bp, Homo sapiens
aggtcaatacctaaa

SEQ ID NO: 36179 - DNA, 15 bp, Homo sapiens
ggtcaatacctaaat

SEQ ID NO: 36180 - DNA, 15 bp, Homo sapiens
gtcaatacctaaatt

SEQ ID NO: 36181 - DNA, 15 bp, Homo sapiens
tcaatacctaaatta

SEQ ID NO: 36182 - DNA, 15 bp, Homo sapiens
caatacctaaattat

SEQ ID NO: 36183 - DNA, 15 bp, Homo sapiens
aatacctaaattatt

SEQ ID NO: 36184 - DNA, 15 bp, Homo sapiens
atacctaaattattt

SEQ ID NO: 36185 - DNA, 15 bp, Homo sapiens
tacctaaattatttg

SEQ ID NO: 36186 - DNA, 15 bp, Homo sapiens
acctaaattatttga

SEQ ID NO: 36187 - DNA, 15 bp, Homo sapiens
cctaaattatttgag

SEQ ID NO: 36188 - DNA, 15 bp, Homo sapiens
ctaaattatttgagg

SEQ ID NO: 36189 - DNA, 15 bp, Homo sapiens
taaattatttgagga

SEQ ID NO: 36190 - DNA, 15 bp, Homo sapiens
aaattatttgaggaa

SEQ ID NO: 36191 - DNA, 15 bp, Homo sapiens
aattatttgaggaaa

SEQ ID NO: 36192 - DNA, 15 bp, Homo sapiens
attatttgaggaaaa

SEQ ID NO: 36193 - DNA, 15 bp, Homo sapiens
ttatttgaggaaaac

SEQ ID NO: 36194 - DNA, 15 bp, Homo sapiens
tatttgaggaaaaca

SEQ ID NO: 36195 - DNA, 15 bp, Homo sapiens
atttgaggaaaacaa

SEQ ID NO: 36196 - DNA, 15 bp, Homo sapiens
tttgaggaaaacaat

SEQ ID NO: 36197 - DNA, 15 bp, Homo sapiens
ttgaggaaaacaatg

SEQ ID NO: 36198 - DNA, 15 bp, Homo sapiens
tgaggaaaacaatgg

SEQ ID NO: 36199 - DNA, 15 bp, Homo sapiens
gaggaaaacaatggc

SEQ ID NO: 36200 - DNA, 15 bp, Homo sapiens
aggaaaacaatggca

SEQ ID NO: 36201 - DNA, 15 bp, Homo sapiens
ggaaaacaatggcac

SEQ ID NO: 36202 - DNA, 15 bp, Homo sapiens
gaaaacaatggcaca

SEQ ID NO: 36203 - DNA, 15 bp, Homo sapiens
aaaacaatggcacag

SEQ ID NO: 36204 - DNA, 15 bp, Homo sapiens
aaacaatggcacaga

SEQ ID NO: 36205 - DNA, 15 bp, Homo sapiens
aacaatggcacagaa

SEQ ID NO: 36206 - DNA, 15 bp, Homo sapiens
acaatggcacagaaa

SEQ ID NO: 36207 - DNA, 15 bp, Homo sapiens
caatggcacagaaat

SEQ ID NO: 36208 - DNA, 15 bp, Homo sapiens
aatggcacagaaatg

SEQ ID NO: 36209 - DNA, 15 bp, Homo sapiens
atggcacagaaatgc

SEQ ID NO: 36210 - DNA, 15 bp, Homo sapiens
tggcacagaaatgca

SEQ ID NO: 36211 - DNA, 15 bp, Homo sapiens
ggcacagaaatgcag

SEQ ID NO: 36212 - DNA, 15 bp, Homo sapiens
gcacagaaatgcaga

SEQ ID NO: 36213 - DNA, 15 bp, Homo sapiens
cacagaaatgcagat

SEQ ID NO: 36214 - DNA, 15 bp, Homo sapiens
acagaaatgcagata

SEQ ID NO: 36215 - DNA, 15 bp, Homo sapiens
cagaaatgcagataa

SEQ ID NO: 36216 - DNA, 15 bp, Homo sapiens
agaaatgcagataat

SEQ ID NO: 36217 - DNA, 15 bp, Homo sapiens
gaaatgcagataatg

SEQ ID NO: 36218 - DNA, 15 bp, Homo sapiens
aaatgcagataatgt

SEQ ID NO: 36219 - DNA, 15 bp, Homo sapiens
aatgcagataatgta

SEQ ID NO: 36220 - DNA, 15 bp, Homo sapiens
atgcagataatgtaa

SEQ ID NO: 36221 - DNA, 15 bp, Homo sapiens
tgcagataatgtaaa

SEQ ID NO: 36222 - DNA, 15 bp, Homo sapiens
gcagataatgtaaag

SEQ ID NO: 36223 - DNA, 15 bp, Homo sapiens
cagataatgtaaaga

SEQ ID NO: 36224 - DNA, 15 bp, Homo sapiens
agataatgtaaagaa

SEQ ID NO: 36225 - DNA, 15 bp, Homo sapiens
gataatgtaaagaag

SEQ ID NO: 36226 - DNA, 15 bp, Homo sapiens
ataatgtaaagaaga

SEQ ID NO: 36227 - DNA, 15 bp, Homo sapiens
taatgtaaagaagaa

SEQ ID NO: 36228 - DNA, 15 bp, Homo sapiens
aatgtaaagaagaaa

SEQ ID NO: 36229 - DNA, 15 bp, Homo sapiens
atgtaaagaagaaag

SEQ ID NO: 36230 - DNA, 15 bp, Homo sapiens
tgtaaagaagaaagc

SEQ ID NO: 36231 - DNA, 15 bp, Homo sapiens
gtaaagaagaaagca

SEQ ID NO: 36232 - DNA, 15 bp, Homo sapiens
taaagaagaaagcaa

SEQ ID NO: 36233 - DNA, 15 bp, Homo sapiens
aaagaagaaagcaaa

SEQ ID NO: 36234 - DNA, 15 bp, Homo sapiens
aagaagaaagcaaaa

SEQ ID NO: 36235 - DNA, 15 bp, Homo sapiens
agaagaaagcaaaaa

SEQ ID NO: 36236 - DNA, 15 bp, Homo sapiens
gaagaaagcaaaaat

SEQ ID NO: 36237 - DNA, 15 bp, Homo sapiens
aagaaagcaaaaatc

SEQ ID NO: 36238 - DNA, 15 bp, Homo sapiens
agaaagcaaaaatca

SEQ ID NO: 36239 - DNA, 15 bp, Homo sapiens
gaaagcaaaaatcaa

SEQ ID NO: 36240 - DNA, 15 bp, Homo sapiens
aaagcaaaaatcaac

SEQ ID NO: 36241 - DNA, 15 bp, Homo sapiens
aagcaaaaatcaact

SEQ ID NO: 36242 - DNA, 15 bp, Homo sapiens
agcaaaaatcaactc

SEQ ID NO: 36243 - DNA, 15 bp, Homo sapiens
gcaaaaatcaactcg

SEQ ID NO: 36244 - DNA, 15 bp, Homo sapiens
caaaaatcaactcgg

SEQ ID NO: 36245 - DNA, 15 bp, Homo sapiens
aaaaatcaactcggg

SEQ ID NO: 36246 - DNA, 15 bp, Homo sapiens
aaaatcaactcgggg

SEQ ID NO: 36247 - DNA, 15 bp, Homo sapiens
aaatcaactcgggga

SEQ ID NO: 36248 - DNA, 15 bp, Homo sapiens
aatcaactcggggaa

SEQ ID NO: 36249 - DNA, 15 bp, Homo sapiens
atcaactcggggaag

SEQ ID NO: 36250 - DNA, 15 bp, Homo sapiens
tcaactcggggaagt

SEQ ID NO: 36251 - DNA, 15 bp, Homo sapiens
caactcggggaagta

SEQ ID NO: 36252 - DNA, 15 bp, Homo sapiens
aactcggggaagtac

SEQ ID NO: 36253 - DNA, 15 bp, Homo sapiens
actcggggaagtacc

SEQ ID NO: 36254 - DNA, 15 bp, Homo sapiens
ctcggggaagtaccc

SEQ ID NO: 36255 - DNA, 15 bp, Homo sapiens
tcggggaagtacccc

SEQ ID NO: 36256 - DNA, 15 bp, Homo sapiens
cggggaagtacccca

SEQ ID NO: 36257 - DNA, 15 bp, Homo sapiens
ggggaagtaccccag

SEQ ID NO: 36258 - DNA, 15 bp, Homo sapiens
gggaagtaccccagc

SEQ ID NO: 36259 - DNA, 15 bp, Homo sapiens
ggaagtaccccagct

SEQ ID NO: 36260 - DNA, 15 bp, Homo sapiens
gaagtaccccagctc

SEQ ID NO: 36261 - DNA, 15 bp, Homo sapiens
aagtaccccagctct

SEQ ID NO: 36262 - DNA, 15 bp, Homo sapiens
agtaccccagctcta

SEQ ID NO: 36263 - DNA, 15 bp, Homo sapiens
gtaccccagctctat

SEQ ID NO: 36264 - DNA, 15 bp, Homo sapiens
taccccagctctatc

SEQ ID NO: 36265 - DNA, 15 bp, Homo sapiens
accccagctctatca

SEQ ID NO: 36266 - DNA, 15 bp, Homo sapiens
ccccagctctatcat

SEQ ID NO: 36267 - DNA, 15 bp, Homo sapiens
cccagctctatcata

SEQ ID NO: 36268 - DNA, 15 bp, Homo sapiens
ccagctctatcatat

SEQ ID NO: 36269 - DNA, 15 bp, Homo sapiens
cagctctatcatatg

SEQ ID NO: 36270 - DNA, 15 bp, Homo sapiens
agctctatcatatgc

SEQ ID NO: 36271 - DNA, 15 bp, Homo sapiens
gctctatcatatgct

SEQ ID NO: 36272 - DNA, 15 bp, Homo sapiens
ctctatcatatgcta

SEQ ID NO: 36273 - DNA, 15 bp, Homo sapiens
tctatcatatgctat

SEQ ID NO: 36274 - DNA, 15 bp, Homo sapiens
ctatcatatgctatt

SEQ ID NO: 36275 - DNA, 15 bp, Homo sapiens
tatcatatgctattt

SEQ ID NO: 36276 - DNA, 15 bp, Homo sapiens
atcatatgctatttg

SEQ ID NO: 36277 - DNA, 15 bp, Homo sapiens
tcatatgctatttgt

SEQ ID NO: 36278 - DNA, 15 bp, Homo sapiens
catatgctatttgtg

SEQ ID NO: 36279 - DNA, 15 bp, Homo sapiens
atatgctatttgtgt

SEQ ID NO: 36280 - DNA, 15 bp, Homo sapiens
tatgctatttgtgtg

SEQ ID NO: 36281 - DNA, 15 bp, Homo sapiens
atgctatttgtgtgg

SEQ ID NO: 36282 - DNA, 15 bp, Homo sapiens
tgctatttgtgtggt

SEQ ID NO: 36283 - DNA, 15 bp, Homo sapiens
gctatttgtgtggtt

SEQ ID NO: 36284 - DNA, 15 bp, Homo sapiens
ctatttgtgtggttt

SEQ ID NO: 36285 - DNA, 15 bp, Homo sapiens
tatttgtgtggtttg

SEQ ID NO: 36286 - DNA, 15 bp, Homo sapiens
atttgtgtggtttgc

SEQ ID NO: 36287 - DNA, 15 bp, Homo sapiens
tttgtgtggtttgcg

SEQ ID NO: 36288 - DNA, 15 bp, Homo sapiens
ttgtgtggtttgcgg

SEQ ID NO: 36289 - DNA, 15 bp, Homo sapiens
tgtgtggtttgcggc

SEQ ID NO: 36290 - DNA, 15 bp, Homo sapiens
gtgtggtttgcggca

SEQ ID NO: 36291 - DNA, 15 bp, Homo sapiens
tgtggtttgcggcaa

SEQ ID NO: 36292 - DNA, 15 bp, Homo sapiens
gtggtttgcggcaaa

SEQ ID NO: 36293 - DNA, 15 bp, Homo sapiens
tggtttgcggcaaat

SEQ ID NO: 36294 - DNA, 15 bp, Homo sapiens
ggtttgcggcaaatc

SEQ ID NO: 36295 - DNA, 15 bp, Homo sapiens
gtttgcggcaaatca

SEQ ID NO: 36296 - DNA, 15 bp, Homo sapiens
tttgcggcaaatcac

SEQ ID NO: 36297 - DNA, 15 bp, Homo sapiens
ttgcggcaaatcacc

SEQ ID NO: 36298 - DNA, 15 bp, Homo sapiens
tgcggcaaatcacct

SEQ ID NO: 36299 - DNA, 15 bp, Homo sapiens
gcggcaaatcacctc

SEQ ID NO: 36300 - DNA, 15 bp, Homo sapiens
cggcaaatcacctca

SEQ ID NO: 36301 - DNA, 15 bp, Homo sapiens
ggcaaatcacctcat

SEQ ID NO: 36302 - DNA, 15 bp, Homo sapiens
gcaaatcacctcatg

SEQ ID NO: 36303 - DNA, 15 bp, Homo sapiens
caaatcacctcatgc

SEQ ID NO: 36304 - DNA, 15 bp, Homo sapiens
aaatcacctcatgct

SEQ ID NO: 36305 - DNA, 15 bp, Homo sapiens
aatcacctcatgctt

SEQ ID NO: 36306 - DNA, 15 bp, Homo sapiens
atcacctcatgcttc

SEQ ID NO: 36307 - DNA, 15 bp, Homo sapiens
tcacctcatgcttcc

SEQ ID NO: 36308 - DNA, 15 bp, Homo sapiens
cacctcatgcttcct

SEQ ID NO: 36309 - DNA, 15 bp, Homo sapiens
acctcatgcttcctc

SEQ ID NO: 36310 - DNA, 15 bp, Homo sapiens
cctcatgcttcctca

SEQ ID NO: 36311 - DNA, 15 bp, Homo sapiens
ctcatgcttcctcat

SEQ ID NO: 36312 - DNA, 15 bp, Homo sapiens
tcatgcttcctcatc

SEQ ID NO: 36313 - DNA, 15 bp, Homo sapiens
catgcttcctcatca

SEQ ID NO: 36314 - DNA, 15 bp, Homo sapiens
atgcttcctcatcaa

SEQ ID NO: 36315 - DNA, 15 bp, Homo sapiens
tgcttcctcatcaat

SEQ ID NO: 36316 - DNA, 15 bp, Homo sapiens
gcttcctcatcaata

SEQ ID NO: 36317 - DNA, 15 bp, Homo sapiens
cttcctcatcaataa

SEQ ID NO: 36318 - DNA, 15 bp, Homo sapiens
ttcctcatcaataag

SEQ ID NO: 36319 - DNA, 15 bp, Homo sapiens
tcctcatcaataaga

SEQ ID NO: 36320 - DNA, 15 bp, Homo sapiens
cctcatcaataagat

SEQ ID NO: 36321 - DNA, 15 bp, Homo sapiens
ctcatcaataagatg

SEQ ID NO: 36322 - DNA, 15 bp, Homo sapiens
tcatcaataagatga

SEQ ID NO: 36323 - DNA, 15 bp, Homo sapiens
catcaataagatgag

SEQ ID NO: 36324 - DNA, 15 bp, Homo sapiens
atcaataagatgagg

SEQ ID NO: 36325 - DNA, 15 bp, Homo sapiens
tcaataagatgagga

SEQ ID NO: 36326 - DNA, 15 bp, Homo sapiens
caataagatgaggat

SEQ ID NO: 36327 - DNA, 15 bp, Homo sapiens
aataagatgaggata

SEQ ID NO: 36328 - DNA, 15 bp, Homo sapiens
ataagatgaggatag

SEQ ID NO: 36329 - DNA, 15 bp, Homo sapiens
taagatgaggatagt

SEQ ID NO: 36330 - DNA, 15 bp, Homo sapiens
aagatgaggatagta

SEQ ID NO: 36331 - DNA, 15 bp, Homo sapiens
agatgaggatagtaa

SEQ ID NO: 36332 - DNA, 15 bp, Homo sapiens
gatgaggatagtaat

SEQ ID NO: 36333 - DNA, 15 bp, Homo sapiens
atgaggatagtaatt

SEQ ID NO: 36334 - DNA, 15 bp, Homo sapiens
tgaggatagtaattc

SEQ ID NO: 36335 - DNA, 15 bp, Homo sapiens
gaggatagtaattca

SEQ ID NO: 36336 - DNA, 15 bp, Homo sapiens
aggatagtaattcat

SEQ ID NO: 36337 - DNA, 15 bp, Homo sapiens
ggatagtaattcata

SEQ ID NO: 36338 - DNA, 15 bp, Homo sapiens
gatagtaattcatat

SEQ ID NO: 36339 - DNA, 15 bp, Homo sapiens
atagtaattcatatc

SEQ ID NO: 36340 - DNA, 15 bp, Homo sapiens
tagtaattcatatct

SEQ ID NO: 36341 - DNA, 15 bp, Homo sapiens
agtaattcatatctt

SEQ ID NO: 36342 - DNA, 15 bp, Homo sapiens
gtaattcatatctta

SEQ ID NO: 36343 - DNA, 15 bp, Homo sapiens
taattcatatcttaa

SEQ ID NO: 36344 - DNA, 15 bp, Homo sapiens
aattcatatcttaaa

SEQ ID NO: 36345 - DNA, 15 bp, Homo sapiens
attcatatcttaaaa

SEQ ID NO: 36346 - DNA, 15 bp, Homo sapiens
ttcatatcttaaaat

SEQ ID NO: 36347 - DNA, 15 bp, Homo sapiens
tcatatcttaaaatt

SEQ ID NO: 36348 - DNA, 15 bp, Homo sapiens
catatcttaaaattc

SEQ ID NO: 36349 - DNA, 15 bp, Homo sapiens
atatcttaaaattct

SEQ ID NO: 36350 - DNA, 15 bp, Homo sapiens
tatcttaaaattctg

SEQ ID NO: 36351 - DNA, 15 bp, Homo sapiens
atcttaaaattctga

SEQ ID NO: 36352 - DNA, 15 bp, Homo sapiens
tcttaaaattctgat

SEQ ID NO: 36353 - DNA, 15 bp, Homo sapiens
cttaaaattctgatt

SEQ ID NO: 36354 - DNA, 15 bp, Homo sapiens
ttaaaattctgatta

SEQ ID NO: 36355 - DNA, 15 bp, Homo sapiens
taaaattctgattag

SEQ ID NO: 36356 - DNA, 15 bp, Homo sapiens
aaaattctgattaga

SEQ ID NO: 36357 - DNA, 15 bp, Homo sapiens
aaattctgattagat

SEQ ID NO: 36358 - DNA, 15 bp, Homo sapiens
aattctgattagatt

SEQ ID NO: 36359 - DNA, 15 bp, Homo sapiens
attctgattagattt

SEQ ID NO: 36360 - DNA, 15 bp, Homo sapiens
ttctgattagatttt

SEQ ID NO: 36361 - DNA, 15 bp, Homo sapiens
tctgattagattttg

SEQ ID NO: 36362 - DNA, 15 bp, Homo sapiens
ctgattagattttgt

SEQ ID NO: 36363 - DNA, 15 bp, Homo sapiens
tgattagattttgta

SEQ ID NO: 36364 - DNA, 15 bp, Homo sapiens
gattagattttgtat

SEQ ID NO: 36365 - DNA, 15 bp, Homo sapiens
attagattttgtata

SEQ ID NO: 36366 - DNA, 15 bp, Homo sapiens
ttagattttgtataa

SEQ ID NO: 36367 - DNA, 15 bp, Homo sapiens
tagattttgtataat

SEQ ID NO: 36368 - DNA, 15 bp, Homo sapiens
agattttgtataatg

SEQ ID NO: 36369 - DNA, 15 bp, Homo sapiens
gattttgtataatga

SEQ ID NO: 36370 - DNA, 15 bp, Homo sapiens
attttgtataatgaa

SEQ ID NO: 36371 - DNA, 15 bp, Homo sapiens
ttttgtataatgaat

SEQ ID NO: 36372 - DNA, 15 bp, Homo sapiens
tttgtataatgaata

SEQ ID NO: 36373 - DNA, 15 bp, Homo sapiens
ttgtataatgaatat

SEQ ID NO: 36374 - DNA, 15 bp, Homo sapiens
tgtataatgaatatt

SEQ ID NO: 36375 - DNA, 15 bp, Homo sapiens
gtataatgaatatta

SEQ ID NO: 36376 - DNA, 15 bp, Homo sapiens
tataatgaatattat

SEQ ID NO: 36377 - DNA, 15 bp, Homo sapiens
ataatgaatattata

SEQ ID NO: 36378 - DNA, 15 bp, Homo sapiens
taatgaatattatat

SEQ ID NO: 36379 - DNA, 15 bp, Homo sapiens
aatgaatattatata

SEQ ID NO: 36380 - DNA, 15 bp, Homo sapiens
atgaatattatatag

SEQ ID NO: 36381 - DNA, 15 bp, Homo sapiens
tgaatattatatagt

SEQ ID NO: 36382 - DNA, 15 bp, Homo sapiens
gaatattatatagta

SEQ ID NO: 36383 - DNA, 15 bp, Homo sapiens
aatattatatagtat

SEQ ID NO: 36384 - DNA, 15 bp, Homo sapiens
atattatatagtatc

SEQ ID NO: 36385 - DNA, 15 bp, Homo sapiens
tattatatagtatca

SEQ ID NO: 36386 - DNA, 15 bp, Homo sapiens
attatatagtatcat

SEQ ID NO: 36387 - DNA, 15 bp, Homo sapiens
ttatatagtatcata

SEQ ID NO: 36388 - DNA, 15 bp, Homo sapiens
tatatagtatcatat

SEQ ID NO: 36389 - DNA, 15 bp, Homo sapiens
atatagtatcatata

SEQ ID NO: 36390 - DNA, 15 bp, Homo sapiens
tatagtatcatatat

SEQ ID NO: 36391 - DNA, 15 bp, Homo sapiens
atagtatcatatata

SEQ ID NO: 36392 - DNA, 15 bp, Homo sapiens
tagtatcatatatat

SEQ ID NO: 36393 - DNA, 15 bp, Homo sapiens
agtatcatatatata

SEQ ID NO: 36394 - DNA, 15 bp, Homo sapiens
gtatcatatatataa

SEQ ID NO: 36395 - DNA, 15 bp, Homo sapiens
tatcatatatataac

SEQ ID NO: 36396 - DNA, 15 bp, Homo sapiens
atcatatatataaca

SEQ ID NO: 36397 - DNA, 15 bp, Homo sapiens
tcatatatataacat

SEQ ID NO: 36398 - DNA, 15 bp, Homo sapiens
catatatataacata

SEQ ID NO: 36399 - DNA, 15 bp, Homo sapiens
atatatataacatat

SEQ ID NO: 36400 - DNA, 15 bp, Homo sapiens
tatatataacatata

SEQ ID NO: 36401 - DNA, 15 bp, Homo sapiens
atatataacatatac

SEQ ID NO: 36402 - DNA, 15 bp, Homo sapiens
tatataacatataca

SEQ ID NO: 36403 - DNA, 15 bp, Homo sapiens
atataacatatacaa

SEQ ID NO: 36404 - DNA, 15 bp, Homo sapiens
tataacatatacaac

SEQ ID NO: 36405 - DNA, 15 bp, Homo sapiens
ataacatatacaaca

SEQ ID NO: 36406 - DNA, 15 bp, Homo sapiens
taacatatacaacac

SEQ ID NO: 36407 - DNA, 15 bp, Homo sapiens
aacatatacaacaca

SEQ ID NO: 36408 - DNA, 15 bp, Homo sapiens
acatatacaacacaa

SEQ ID NO: 36409 - DNA, 15 bp, Homo sapiens
catatacaacacaat

SEQ ID NO: 36410 - DNA, 15 bp, Homo sapiens
atatacaacacaatt

SEQ ID NO: 36411 - DNA, 15 bp, Homo sapiens
tatacaacacaatta

SEQ ID NO: 36412 - DNA, 15 bp, Homo sapiens
atacaacacaattat

SEQ ID NO: 36413 - DNA, 15 bp, Homo sapiens
tacaacacaattata

SEQ ID NO: 36414 - DNA, 15 bp, Homo sapiens
acaacacaattatat

SEQ ID NO: 36415 - DNA, 15 bp, Homo sapiens
caacacaattatata

SEQ ID NO: 36416 - DNA, 15 bp, Homo sapiens
aacacaattatatat

SEQ ID NO: 36417 - DNA, 15 bp, Homo sapiens
acacaattatatatt

SEQ ID NO: 36418 - DNA, 15 bp, Homo sapiens
cacaattatatattg

SEQ ID NO: 36419 - DNA, 15 bp, Homo sapiens
acaattatatattgc

SEQ ID NO: 36420 - DNA, 15 bp, Homo sapiens
caattatatattgca

SEQ ID NO: 36421 - DNA, 15 bp, Homo sapiens
aattatatattgcat

SEQ ID NO: 36422 - DNA, 15 bp, Homo sapiens
attatatattgcatg

SEQ ID NO: 36423 - DNA, 15 bp, Homo sapiens
ttatatattgcatga

SEQ ID NO: 36424 - DNA, 15 bp, Homo sapiens
tatatattgcatgat

SEQ ID NO: 36425 - DNA, 15 bp, Homo sapiens
atatattgcatgata

SEQ ID NO: 36426 - DNA, 15 bp, Homo sapiens
tatattgcatgatac

SEQ ID NO: 36427 - DNA, 15 bp, Homo sapiens
atattgcatgataca

SEQ ID NO: 36428 - DNA, 15 bp, Homo sapiens
tattgcatgatacat

SEQ ID NO: 36429 - DNA, 15 bp, Homo sapiens
attgcatgatacata

SEQ ID NO: 36430 - DNA, 15 bp, Homo sapiens
ttgcatgatacatat

SEQ ID NO: 36431 - DNA, 15 bp, Homo sapiens
tgcatgatacatatt

SEQ ID NO: 36432 - DNA, 15 bp, Homo sapiens
gcatgatacatattg

SEQ ID NO: 36433 - DNA, 15 bp, Homo sapiens
catgatacatattgt

SEQ ID NO: 36434 - DNA, 15 bp, Homo sapiens
atgatacatattgta

SEQ ID NO: 36435 - DNA, 15 bp, Homo sapiens
tgatacatattgtat

SEQ ID NO: 36436 - DNA, 15 bp, Homo sapiens
gatacatattgtatg

SEQ ID NO: 36437 - DNA, 15 bp, Homo sapiens
atacatattgtatgc

SEQ ID NO: 36438 - DNA, 15 bp, Homo sapiens
tacatattgtatgca

SEQ ID NO: 36439 - DNA, 15 bp, Homo sapiens
acatattgtatgcaa

SEQ ID NO: 36440 - DNA, 15 bp, Homo sapiens
catattgtatgcaag

SEQ ID NO: 36441 - DNA, 15 bp, Homo sapiens
atattgtatgcaagt

SEQ ID NO: 36442 - DNA, 15 bp, Homo sapiens
tattgtatgcaagta

SEQ ID NO: 36443 - DNA, 15 bp, Homo sapiens
attgtatgcaagtac

SEQ ID NO: 36444 - DNA, 15 bp, Homo sapiens
ttgtatgcaagtaca

SEQ ID NO: 36445 - DNA, 15 bp, Homo sapiens
tgtatgcaagtacat

SEQ ID NO: 36446 - DNA, 15 bp, Homo sapiens
gtatgcaagtacatt

SEQ ID NO: 36447 - DNA, 15 bp, Homo sapiens
tatgcaagtacattt

SEQ ID NO: 36448 - DNA, 15 bp, Homo sapiens
atgcaagtacatttc

SEQ ID NO: 36449 - DNA, 15 bp, Homo sapiens
tgcaagtacatttct

SEQ ID NO: 36450 - DNA, 15 bp, Homo sapiens
gcaagtacatttcta

SEQ ID NO: 36451 - DNA, 15 bp, Homo sapiens
caagtacatttctat

SEQ ID NO: 36452 - DNA, 15 bp, Homo sapiens
aagtacatttctatt

SEQ ID NO: 36453 - DNA, 15 bp, Homo sapiens
agtacatttctattg

SEQ ID NO: 36454 - DNA, 15 bp, Homo sapiens
gtacatttctattgc

SEQ ID NO: 36455 - DNA, 15 bp, Homo sapiens
tacatttctattgca

SEQ ID NO: 36456 - DNA, 15 bp, Homo sapiens
acatttctattgcat

SEQ ID NO: 36457 - DNA, 15 bp, Homo sapiens
catttctattgcatt

SEQ ID NO: 36458 - DNA, 15 bp, Homo sapiens
atttctattgcatta

SEQ ID NO: 36459 - DNA, 15 bp, Homo sapiens
tttctattgcattat

SEQ ID NO: 36460 - DNA, 15 bp, Homo sapiens
ttctattgcattatc

SEQ ID NO: 36461 - DNA, 15 bp, Homo sapiens
tctattgcattatct

SEQ ID NO: 36462 - DNA, 15 bp, Homo sapiens
ctattgcattatcta

SEQ ID NO: 36463 - DNA, 15 bp, Homo sapiens
tattgcattatctaa

SEQ ID NO: 36464 - DNA, 15 bp, Homo sapiens
attgcattatctaaa

SEQ ID NO: 36465 - DNA, 15 bp, Homo sapiens
ttgcattatctaaac

SEQ ID NO: 36466 - DNA, 15 bp, Homo sapiens
tgcattatctaaact

SEQ ID NO: 36467 - DNA, 15 bp, Homo sapiens
gcattatctaaactg

SEQ ID NO: 36468 - DNA, 15 bp, Homo sapiens
cattatctaaactgc

SEQ ID NO: 36469 - DNA, 15 bp, Homo sapiens
attatctaaactgca

SEQ ID NO: 36470 - DNA, 15 bp, Homo sapiens
ttatctaaactgcat

SEQ ID NO: 36471 - DNA, 15 bp, Homo sapiens
tatctaaactgcatg

SEQ ID NO: 36472 - DNA, 15 bp, Homo sapiens
atctaaactgcatga

SEQ ID NO: 36473 - DNA, 15 bp, Homo sapiens
tctaaactgcatgat

SEQ ID NO: 36474 - DNA, 15 bp, Homo sapiens
ctaaactgcatgata

SEQ ID NO: 36475 - DNA, 15 bp, Homo sapiens
taaactgcatgataa

SEQ ID NO: 36476 - DNA, 15 bp, Homo sapiens
aaactgcatgataaa

SEQ ID NO: 36477 - DNA, 15 bp, Homo sapiens
aactgcatgataaaa

SEQ ID NO: 36478 - DNA, 15 bp, Homo sapiens
actgcatgataaaat

SEQ ID NO: 36479 - DNA, 15 bp, Homo sapiens
ctgcatgataaaata

SEQ ID NO: 36480 - DNA, 15 bp, Homo sapiens
tgcatgataaaatag

SEQ ID NO: 36481 - DNA, 15 bp, Homo sapiens
gcatgataaaatagc

SEQ ID NO: 36482 - DNA, 15 bp, Homo sapiens
catgataaaatagct

SEQ ID NO: 36483 - DNA, 15 bp, Homo sapiens
atgataaaatagctt

SEQ ID NO: 36484 - DNA, 15 bp, Homo sapiens
tgataaaatagctta

SEQ ID NO: 36485 - DNA, 15 bp, Homo sapiens
gataaaatagcttat

SEQ ID NO: 36486 - DNA, 15 bp, Homo sapiens
ataaaatagcttatg

SEQ ID NO: 36487 - DNA, 15 bp, Homo sapiens
taaaatagcttatgt

SEQ ID NO: 36488 - DNA, 15 bp, Homo sapiens
aaaatagcttatgta

SEQ ID NO: 36489 - DNA, 15 bp, Homo sapiens
aaatagcttatgtaa

SEQ ID NO: 36490 - DNA, 15 bp, Homo sapiens
aatagcttatgtaag

SEQ ID NO: 36491 - DNA, 15 bp, Homo sapiens
atagcttatgtaagc

SEQ ID NO: 36492 - DNA, 15 bp, Homo sapiens
tagcttatgtaagct

SEQ ID NO: 36493 - DNA, 15 bp, Homo sapiens
agcttatgtaagcta

SEQ ID NO: 36494 - DNA, 15 bp, Homo sapiens
gcttatgtaagctat

SEQ ID NO: 36495 - DNA, 15 bp, Homo sapiens
cttatgtaagctatt

SEQ ID NO: 36496 - DNA, 15 bp, Homo sapiens
ttatgtaagctattt

SEQ ID NO: 36497 - DNA, 15 bp, Homo sapiens
tatgtaagctattta

SEQ ID NO: 36498 - DNA, 15 bp, Homo sapiens
atgtaagctatttat

SEQ ID NO: 36499 - DNA, 15 bp, Homo sapiens
tgtaagctatttatc

SEQ ID NO: 36500 - DNA, 15 bp, Homo sapiens
gtaagctatttatca

SEQ ID NO: 36501 - DNA, 15 bp, Homo sapiens
taagctatttatcat

SEQ ID NO: 36502 - DNA, 15 bp, Homo sapiens
aagctatttatcatg

SEQ ID NO: 36503 - DNA, 15 bp, Homo sapiens
agctatttatcatgc

SEQ ID NO: 36504 - DNA, 15 bp, Homo sapiens
gctatttatcatgca

SEQ ID NO: 36505 - DNA, 15 bp, Homo sapiens
ctatttatcatgcag

SEQ ID NO: 36506 - DNA, 15 bp, Homo sapiens
tatttatcatgcagc

SEQ ID NO: 36507 - DNA, 15 bp, Homo sapiens
atttatcatgcagca

SEQ ID NO: 36508 - DNA, 15 bp, Homo sapiens
tttatcatgcagcat

SEQ ID NO: 36509 - DNA, 15 bp, Homo sapiens
ttatcatgcagcatt

SEQ ID NO: 36510 - DNA, 15 bp, Homo sapiens
tatcatgcagcattt

SEQ ID NO: 36511 - DNA, 15 bp, Homo sapiens
atcatgcagcattta

SEQ ID NO: 36512 - DNA, 15 bp, Homo sapiens
tcatgcagcatttat

SEQ ID NO: 36513 - DNA, 15 bp, Homo sapiens
catgcagcatttatg

SEQ ID NO: 36514 - DNA, 15 bp, Homo sapiens
atgcagcatttatgt

SEQ ID NO: 36515 - DNA, 15 bp, Homo sapiens
tgcagcatttatgta

SEQ ID NO: 36516 - DNA, 15 bp, Homo sapiens
gcagcatttatgtaa

SEQ ID NO: 36517 - DNA, 15 bp, Homo sapiens
cagcatttatgtaaa

SEQ ID NO: 36518 - DNA, 15 bp, Homo sapiens
agcatttatgtaaag

SEQ ID NO: 36519 - DNA, 15 bp, Homo sapiens
gcatttatgtaaagg

SEQ ID NO: 36520 - DNA, 15 bp, Homo sapiens
catttatgtaaaggc

SEQ ID NO: 36521 - DNA, 15 bp, Homo sapiens
atttatgtaaaggca

SEQ ID NO: 36522 - DNA, 15 bp, Homo sapiens
tttatgtaaaggcaa

SEQ ID NO: 36523 - DNA, 15 bp, Homo sapiens
ttatgtaaaggcaat

SEQ ID NO: 36524 - DNA, 15 bp, Homo sapiens
tatgtaaaggcaata

SEQ ID NO: 36525 - DNA, 15 bp, Homo sapiens
atgtaaaggcaatag

SEQ ID NO: 36526 - DNA, 15 bp, Homo sapiens
tgtaaaggcaataga

SEQ ID NO: 36527 - DNA, 15 bp, Homo sapiens
gtaaaggcaatagaa

SEQ ID NO: 36528 - DNA, 15 bp, Homo sapiens
taaaggcaatagaaa

SEQ ID NO: 36529 - DNA, 15 bp, Homo sapiens
aaaggcaatagaaac

SEQ ID NO: 36530 - DNA, 15 bp, Homo sapiens
aaggcaatagaaaca

SEQ ID NO: 36531 - DNA, 15 bp, Homo sapiens
aggcaatagaaacaa

SEQ ID NO: 36532 - DNA, 15 bp, Homo sapiens
ggcaatagaaacaaa

SEQ ID NO: 36533 - DNA, 15 bp, Homo sapiens
gcaatagaaacaaat

SEQ ID NO: 36534 - DNA, 15 bp, Homo sapiens
caatagaaacaaatg

SEQ ID NO: 36535 - DNA, 15 bp, Homo sapiens
aatagaaacaaatgt

SEQ ID NO: 36536 - DNA, 15 bp, Homo sapiens
atagaaacaaatgtc

SEQ ID NO: 36537 - DNA, 15 bp, Homo sapiens
tagaaacaaatgtct

SEQ ID NO: 36538 - DNA, 15 bp, Homo sapiens
agaaacaaatgtctt

SEQ ID NO: 36539 - DNA, 15 bp, Homo sapiens
gaaacaaatgtctta

SEQ ID NO: 36540 - DNA, 15 bp, Homo sapiens
aaacaaatgtcttat

SEQ ID NO: 36541 - DNA, 15 bp, Homo sapiens
aacaaatgtcttatt

SEQ ID NO: 36542 - DNA, 15 bp, Homo sapiens
acaaatgtcttattt

SEQ ID NO: 36543 - DNA, 15 bp, Homo sapiens
caaatgtcttatttc

SEQ ID NO: 36544 - DNA, 15 bp, Homo sapiens
aaatgtcttatttct

SEQ ID NO: 36545 - DNA, 15 bp, Homo sapiens
aatgtcttatttctt

SEQ ID NO: 36546 - DNA, 15 bp, Homo sapiens
atgtcttatttctta

SEQ ID NO: 36547 - DNA, 15 bp, Homo sapiens
tgtcttatttcttag

SEQ ID NO: 36548 - DNA, 15 bp, Homo sapiens
gtcttatttcttagt

SEQ ID NO: 36549 - DNA, 15 bp, Homo sapiens
tcttatttcttagta

SEQ ID NO: 36550 - DNA, 15 bp, Homo sapiens
cttatttcttagtac

SEQ ID NO: 36551 - DNA, 15 bp, Homo sapiens
ttatttcttagtact

SEQ ID NO: 36552 - DNA, 15 bp, Homo sapiens
tatttcttagtactt

SEQ ID NO: 36553 - DNA, 15 bp, Homo sapiens
atttcttagtacttg

SEQ ID NO: 36554 - DNA, 15 bp, Homo sapiens
tttcttagtacttga

SEQ ID NO: 36555 - DNA, 15 bp, Homo sapiens
ttcttagtacttgag

SEQ ID NO: 36556 - DNA, 15 bp, Homo sapiens
tcttagtacttgaga

SEQ ID NO: 36557 - DNA, 15 bp, Homo sapiens
cttagtacttgagaa

SEQ ID NO: 36558 - DNA, 15 bp, Homo sapiens
ttagtacttgagaaa

SEQ ID NO: 36559 - DNA, 15 bp, Homo sapiens
tagtacttgagaaat

SEQ ID NO: 36560 - DNA, 15 bp, Homo sapiens
agtacttgagaaatt

SEQ ID NO: 36561 - DNA, 15 bp, Homo sapiens
gtacttgagaaattt

SEQ ID NO: 36562 - DNA, 15 bp, Homo sapiens
tacttgagaaatttg

SEQ ID NO: 36563 - DNA, 15 bp, Homo sapiens
acttgagaaatttgg

SEQ ID NO: 36564 - DNA, 15 bp, Homo sapiens
cttgagaaatttggt

SEQ ID NO: 36565 - DNA, 15 bp, Homo sapiens
ttgagaaatttggtg

SEQ ID NO: 36566 - DNA, 15 bp, Homo sapiens
tgagaaatttggtgt

SEQ ID NO: 36567 - DNA, 15 bp, Homo sapiens
gagaaatttggtgta

SEQ ID NO: 36568 - DNA, 15 bp, Homo sapiens
agaaatttggtgtag

SEQ ID NO: 36569 - DNA, 15 bp, Homo sapiens
gaaatttggtgtagc

SEQ ID NO: 36570 - DNA, 15 bp, Homo sapiens
aaatttggtgtagct

SEQ ID NO: 36571 - DNA, 15 bp, Homo sapiens
aatttggtgtagctt

SEQ ID NO: 36572 - DNA, 15 bp, Homo sapiens
atttggtgtagcttg

SEQ ID NO: 36573 - DNA, 15 bp, Homo sapiens
tttggtgtagcttga

SEQ ID NO: 36574 - DNA, 15 bp, Homo sapiens
ttggtgtagcttgaa

SEQ ID NO: 36575 - DNA, 15 bp, Homo sapiens
tggtgtagcttgaaa

SEQ ID NO: 36576 - DNA, 15 bp, Homo sapiens
ggtgtagcttgaaag

SEQ ID NO: 36577 - DNA, 15 bp, Homo sapiens
gtgtagcttgaaaga

SEQ ID NO: 36578 - DNA, 15 bp, Homo sapiens
tgtagcttgaaagat

SEQ ID NO: 36579 - DNA, 15 bp, Homo sapiens
gtagcttgaaagata

SEQ ID NO: 36580 - DNA, 15 bp, Homo sapiens
tagcttgaaagatac

SEQ ID NO: 36581 - DNA, 15 bp, Homo sapiens
agcttgaaagataca

SEQ ID NO: 36582 - DNA, 15 bp, Homo sapiens
gcttgaaagatacat

SEQ ID NO: 36583 - DNA, 15 bp, Homo sapiens
cttgaaagatacatg

SEQ ID NO: 36584 - DNA, 15 bp, Homo sapiens
ttgaaagatacatgt

SEQ ID NO: 36585 - DNA, 15 bp, Homo sapiens
tgaaagatacatgtt

SEQ ID NO: 36586 - DNA, 15 bp, Homo sapiens
gaaagatacatgtta

SEQ ID NO: 36587 - DNA, 15 bp, Homo sapiens
aaagatacatgttag

SEQ ID NO: 36588 - DNA, 15 bp, Homo sapiens
aagatacatgttagt

SEQ ID NO: 36589 - DNA, 15 bp, Homo sapiens
agatacatgttagtc

SEQ ID NO: 36590 - DNA, 15 bp, Homo sapiens
gatacatgttagtct

SEQ ID NO: 36591 - DNA, 15 bp, Homo sapiens
atacatgttagtctt

SEQ ID NO: 36592 - DNA, 15 bp, Homo sapiens
tacatgttagtcttc

SEQ ID NO: 36593 - DNA, 15 bp, Homo sapiens
acatgttagtcttca

SEQ ID NO: 36594 - DNA, 15 bp, Homo sapiens
catgttagtcttcaa

SEQ ID NO: 36595 - DNA, 15 bp, Homo sapiens
atgttagtcttcaaa

SEQ ID NO: 36596 - DNA, 15 bp, Homo sapiens
tgttagtcttcaaag

SEQ ID NO: 36597 - DNA, 15 bp, Homo sapiens
gttagtcttcaaagt

SEQ ID NO: 36598 - DNA, 15 bp, Homo sapiens
ttagtcttcaaagta

SEQ ID NO: 36599 - DNA, 15 bp, Homo sapiens
tagtcttcaaagtaa

SEQ ID NO: 36600 - DNA, 15 bp, Homo sapiens
agtcttcaaagtaag

SEQ ID NO: 36601 - DNA, 15 bp, Homo sapiens
gtcttcaaagtaagt

SEQ ID NO: 36602 - DNA, 15 bp, Homo sapiens
tcttcaaagtaagtt

SEQ ID NO: 36603 - DNA, 15 bp, Homo sapiens
cttcaaagtaagttt

SEQ ID NO: 36604 - DNA, 15 bp, Homo sapiens
ttcaaagtaagttta

SEQ ID NO: 36605 - DNA, 15 bp, Homo sapiens
tcaaagtaagtttat

SEQ ID NO: 36606 - DNA, 15 bp, Homo sapiens
caaagtaagtttatt

SEQ ID NO: 36607 - DNA, 15 bp, Homo sapiens
aaagtaagtttatta

SEQ ID NO: 36608 - DNA, 15 bp, Homo sapiens
aagtaagtttattat

SEQ ID NO: 36609 - DNA, 15 bp, Homo sapiens
agtaagtttattatg

SEQ ID NO: 36610 - DNA, 15 bp, Homo sapiens
gtaagtttattatga

SEQ ID NO: 36611 - DNA, 15 bp, Homo sapiens
taagtttattatgaa

SEQ ID NO: 36612 - DNA, 15 bp, Homo sapiens
aagtttattatgaat

SEQ ID NO: 36613 - DNA, 15 bp, Homo sapiens
agtttattatgaatt

SEQ ID NO: 36614 - DNA, 15 bp, Homo sapiens
gtttattatgaattt

SEQ ID NO: 36615 - DNA, 15 bp, Homo sapiens
tttattatgaattta

SEQ ID NO: 36616 - DNA, 15 bp, Homo sapiens
ttattatgaatttaa

SEQ ID NO: 36617 - DNA, 15 bp, Homo sapiens
tattatgaatttaat

SEQ ID NO: 36618 - DNA, 15 bp, Homo sapiens
attatgaatttaata

SEQ ID NO: 36619 - DNA, 15 bp, Homo sapiens
ttatgaatttaataa

SEQ ID NO: 36620 - DNA, 15 bp, Homo sapiens
tatgaatttaataac

SEQ ID NO: 36621 - DNA, 15 bp, Homo sapiens
atgaatttaataact

SEQ ID NO: 36622 - DNA, 15 bp, Homo sapiens
tgaatttaataactc

SEQ ID NO: 36623 - DNA, 15 bp, Homo sapiens
gaatttaataactcc

SEQ ID NO: 36624 - DNA, 15 bp, Homo sapiens
aatttaataactcca

SEQ ID NO: 36625 - DNA, 15 bp, Homo sapiens
atttaataactccat

SEQ ID NO: 36626 - DNA, 15 bp, Homo sapiens
tttaataactccata

SEQ ID NO: 36627 - DNA, 15 bp, Homo sapiens
ttaataactccatat

SEQ ID NO: 36628 - DNA, 15 bp, Homo sapiens
taataactccatatt

SEQ ID NO: 36629 - DNA, 15 bp, Homo sapiens
aataactccatattt

SEQ ID NO: 36630 - DNA, 15 bp, Homo sapiens
ataactccatatttt

SEQ ID NO: 36631 - DNA, 15 bp, Homo sapiens
taactccatatttta

SEQ ID NO: 36632 - DNA, 15 bp, Homo sapiens
aactccatattttaa

SEQ ID NO: 36633 - DNA, 15 bp, Homo sapiens
actccatattttaaa

SEQ ID NO: 36634 - DNA, 15 bp, Homo sapiens
ctccatattttaaac

SEQ ID NO: 36635 - DNA, 15 bp, Homo sapiens
tccatattttaaact

SEQ ID NO: 36636 - DNA, 15 bp, Homo sapiens
ccatattttaaactt

SEQ ID NO: 36637 - DNA, 15 bp, Homo sapiens
catattttaaacttc

SEQ ID NO: 36638 - DNA, 15 bp, Homo sapiens
atattttaaacttct

SEQ ID NO: 36639 - DNA, 15 bp, Homo sapiens
tattttaaacttcta

SEQ ID NO: 36640 - DNA, 15 bp, Homo sapiens
attttaaacttctaa

SEQ ID NO: 36641 - DNA, 15 bp, Homo sapiens
ttttaaacttctaat

SEQ ID NO: 36642 - DNA, 15 bp, Homo sapiens
tttaaacttctaatt

SEQ ID NO: 36643 - DNA, 15 bp, Homo sapiens
ttaaacttctaattt

SEQ ID NO: 36644 - DNA, 15 bp, Homo sapiens
taaacttctaattta

SEQ ID NO: 36645 - DNA, 15 bp, Homo sapiens
aaacttctaatttat

SEQ ID NO: 36646 - DNA, 15 bp, Homo sapiens
aacttctaatttatg

SEQ ID NO: 36647 - DNA, 15 bp, Homo sapiens
acttctaatttatga

SEQ ID NO: 36648 - DNA, 15 bp, Homo sapiens
cttctaatttatgaa

SEQ ID NO: 36649 - DNA, 15 bp, Homo sapiens
ttctaatttatgaag

SEQ ID NO: 36650 - DNA, 15 bp, Homo sapiens
tctaatttatgaaga

SEQ ID NO: 36651 - DNA, 15 bp, Homo sapiens
ctaatttatgaagaa

SEQ ID NO: 36652 - DNA, 15 bp, Homo sapiens
taatttatgaagaat

SEQ ID NO: 36653 - DNA, 15 bp, Homo sapiens
aatttatgaagaatt

SEQ ID NO: 36654 - DNA, 15 bp, Homo sapiens
atttatgaagaattc

SEQ ID NO: 36655 - DNA, 15 bp, Homo sapiens
tttatgaagaattct

SEQ ID NO: 36656 - DNA, 15 bp, Homo sapiens
ttatgaagaattctt

SEQ ID NO: 36657 - DNA, 15 bp, Homo sapiens
tatgaagaattctta

SEQ ID NO: 36658 - DNA, 15 bp, Homo sapiens
atgaagaattcttac

SEQ ID NO: 36659 - DNA, 15 bp, Homo sapiens
tgaagaattcttact

SEQ ID NO: 36660 - DNA, 15 bp, Homo sapiens
gaagaattcttactt

SEQ ID NO: 36661 - DNA, 15 bp, Homo sapiens
aagaattcttacttt

SEQ ID NO: 36662 - DNA, 15 bp, Homo sapiens
agaattcttactttt

SEQ ID NO: 36663 - DNA, 15 bp, Homo sapiens
gaattcttacttttg

SEQ ID NO: 36664 - DNA, 15 bp, Homo sapiens
aattcttacttttgg

SEQ ID NO: 36665 - DNA, 15 bp, Homo sapiens
attcttacttttgga

SEQ ID NO: 36666 - DNA, 15 bp, Homo sapiens
ttcttacttttggaa

SEQ ID NO: 36667 - DNA, 15 bp, Homo sapiens
tcttacttttggaaa

SEQ ID NO: 36668 - DNA, 15 bp, Homo sapiens
cttacttttggaaaa

SEQ ID NO: 36669 - DNA, 15 bp, Homo sapiens
ttacttttggaaaac

SEQ ID NO: 36670 - DNA, 15 bp, Homo sapiens
tacttttggaaaaca

SEQ ID NO: 36671 - DNA, 15 bp, Homo sapiens
acttttggaaaacaa

SEQ ID NO: 36672 - DNA, 15 bp, Homo sapiens
cttttggaaaacaaa

SEQ ID NO: 36673 - DNA, 15 bp, Homo sapiens
ttttggaaaacaaaa

SEQ ID NO: 36674 - DNA, 15 bp, Homo sapiens
tttggaaaacaaaaa

SEQ ID NO: 36675 - DNA, 15 bp, Homo sapiens
ttggaaaacaaaaaa

SEQ ID NO: 36676 - DNA, 15 bp, Homo sapiens
tggaaaacaaaaaaa

SEQ ID NO: 36677 - DNA, 15 bp, Homo sapiens
ggaaaacaaaaaaat

SEQ ID NO: 36678 - DNA, 15 bp, Homo sapiens
gaaaacaaaaaaatt

SEQ ID NO: 36679 - DNA, 15 bp, Homo sapiens
aaaacaaaaaaattt

SEQ ID NO: 36680 - DNA, 15 bp, Homo sapiens
aaacaaaaaaattta

SEQ ID NO: 36681 - DNA, 15 bp, Homo sapiens
aacaaaaaaatttac

SEQ ID NO: 36682 - DNA, 15 bp, Homo sapiens
acaaaaaaatttacc

SEQ ID NO: 36683 - DNA, 15 bp, Homo sapiens
caaaaaaatttacct

SEQ ID NO: 36684 - DNA, 15 bp, Homo sapiens
aaaaaaatttacctt

SEQ ID NO: 36685 - DNA, 15 bp, Homo sapiens
aaaaaatttaccttt

SEQ ID NO: 36686 - DNA, 15 bp, Homo sapiens
aaaaatttacctttg

SEQ ID NO: 36687 - DNA, 15 bp, Homo sapiens
aaaatttacctttgc

SEQ ID NO: 36688 - DNA, 15 bp, Homo sapiens
aaatttacctttgca

SEQ ID NO: 36689 - DNA, 15 bp, Homo sapiens
aatttacctttgcag

SEQ ID NO: 36690 - DNA, 15 bp, Homo sapiens
atttacctttgcagt

SEQ ID NO: 36691 - DNA, 15 bp, Homo sapiens
tttacctttgcagta

SEQ ID NO: 36692 - DNA, 15 bp, Homo sapiens
ttacctttgcagtag

SEQ ID NO: 36693 - DNA, 15 bp, Homo sapiens
tacctttgcagtagc

SEQ ID NO: 36694 - DNA, 15 bp, Homo sapiens
acctttgcagtagcg

SEQ ID NO: 36695 - DNA, 15 bp, Homo sapiens
cctttgcagtagcgt

SEQ ID NO: 36696 - DNA, 15 bp, Homo sapiens
ctttgcagtagcgtt

SEQ ID NO: 36697 - DNA, 15 bp, Homo sapiens
tttgcagtagcgttc

SEQ ID NO: 36698 - DNA, 15 bp, Homo sapiens
ttgcagtagcgttcg

SEQ ID NO: 36699 - DNA, 15 bp, Homo sapiens
tgcagtagcgttcgc

SEQ ID NO: 36700 - DNA, 15 bp, Homo sapiens
gcagtagcgttcgct

SEQ ID NO: 36701 - DNA, 15 bp, Homo sapiens
cagtagcgttcgctc

SEQ ID NO: 36702 - DNA, 15 bp, Homo sapiens
agtagcgttcgctct

SEQ ID NO: 36703 - DNA, 15 bp, Homo sapiens
gtagcgttcgctctc

SEQ ID NO: 36704 - DNA, 15 bp, Homo sapiens
tagcgttcgctctca

SEQ ID NO: 36705 - DNA, 15 bp, Homo sapiens
agcgttcgctctcac

SEQ ID NO: 36706 - DNA, 15 bp, Homo sapiens
gcgttcgctctcact

SEQ ID NO: 36707 - DNA, 15 bp, Homo sapiens
cgttcgctctcactt

SEQ ID NO: 36708 - DNA, 15 bp, Homo sapiens
gttcgctctcacttc

SEQ ID NO: 36709 - DNA, 15 bp, Homo sapiens
ttcgctctcacttca

SEQ ID NO: 36710 - DNA, 15 bp, Homo sapiens
tcgctctcacttcag

SEQ ID NO: 36711 - DNA, 15 bp, Homo sapiens
cgctctcacttcagg

SEQ ID NO: 36712 - DNA, 15 bp, Homo sapiens
gctctcacttcagga

SEQ ID NO: 36713 - DNA, 15 bp, Homo sapiens
ctctcacttcaggac

SEQ ID NO: 36714 - DNA, 15 bp, Homo sapiens
tctcacttcaggact

SEQ ID NO: 36715 - DNA, 15 bp, Homo sapiens
ctcacttcaggactg

SEQ ID NO: 36716 - DNA, 15 bp, Homo sapiens
tcacttcaggactgc

SEQ ID NO: 36717 - DNA, 15 bp, Homo sapiens
cacttcaggactgct

SEQ ID NO: 36718 - DNA, 15 bp, Homo sapiens
acttcaggactgcta

SEQ ID NO: 36719 - DNA, 15 bp, Homo sapiens
cttcaggactgctac

SEQ ID NO: 36720 - DNA, 15 bp, Homo sapiens
ttcaggactgctact

SEQ ID NO: 36721 - DNA, 15 bp, Homo sapiens
tcaggactgctactg

SEQ ID NO: 36722 - DNA, 15 bp, Homo sapiens
caggactgctactga

SEQ ID NO: 36723 - DNA, 15 bp, Homo sapiens
aggactgctactgat

SEQ ID NO: 36724 - DNA, 15 bp, Homo sapiens
ggactgctactgatg

SEQ ID NO: 36725 - DNA, 15 bp, Homo sapiens
gactgctactgatgt

SEQ ID NO: 36726 - DNA, 15 bp, Homo sapiens
actgctactgatgtc

SEQ ID NO: 36727 - DNA, 15 bp, Homo sapiens
ctgctactgatgtcc

SEQ ID NO: 36728 - DNA, 15 bp, Homo sapiens
tgctactgatgtcca

SEQ ID NO: 36729 - DNA, 15 bp, Homo sapiens
gctactgatgtccac

SEQ ID NO: 36730 - DNA, 15 bp, Homo sapiens
ctactgatgtccaca

SEQ ID NO: 36731 - DNA, 15 bp, Homo sapiens
tactgatgtccacag

SEQ ID NO: 36732 - DNA, 15 bp, Homo sapiens
actgatgtccacagt

SEQ ID NO: 36733 - DNA, 15 bp, Homo sapiens
ctgatgtccacagtc

SEQ ID NO: 36734 - DNA, 15 bp, Homo sapiens
tgatgtccacagtct

SEQ ID NO: 36735 - DNA, 15 bp, Homo sapiens
gatgtccacagtctc

SEQ ID NO: 36736 - DNA, 15 bp, Homo sapiens
atgtccacagtctca

SEQ ID NO: 36737 - DNA, 15 bp, Homo sapiens
tgtccacagtctcat

SEQ ID NO: 36738 - DNA, 15 bp, Homo sapiens
gtccacagtctcata

SEQ ID NO: 36739 - DNA, 15 bp, Homo sapiens
tccacagtctcatag

SEQ ID NO: 36740 - DNA, 15 bp, Homo sapiens
ccacagtctcataga

SEQ ID NO: 36741 - DNA, 15 bp, Homo sapiens
cacagtctcatagac

SEQ ID NO: 36742 - DNA, 15 bp, Homo sapiens
acagtctcatagaca

SEQ ID NO: 36743 - DNA, 15 bp, Homo sapiens
cagtctcatagacat

SEQ ID NO: 36744 - DNA, 15 bp, Homo sapiens
agtctcatagacatg

SEQ ID NO: 36745 - DNA, 15 bp, Homo sapiens
gtctcatagacatgt

SEQ ID NO: 36746 - DNA, 15 bp, Homo sapiens
tctcatagacatgtt

SEQ ID NO: 36747 - DNA, 15 bp, Homo sapiens
ctcatagacatgttc

SEQ ID NO: 36748 - DNA, 15 bp, Homo sapiens
tcatagacatgttca

SEQ ID NO: 36749 - DNA, 15 bp, Homo sapiens
catagacatgttcat

SEQ ID NO: 36750 - DNA, 15 bp, Homo sapiens
atagacatgttcata

SEQ ID NO: 36751 - DNA, 15 bp, Homo sapiens
tagacatgttcatat

SEQ ID NO: 36752 - DNA, 15 bp, Homo sapiens
agacatgttcatata

SEQ ID NO: 36753 - DNA, 15 bp, Homo sapiens
gacatgttcatatac

SEQ ID NO: 36754 - DNA, 15 bp, Homo sapiens
acatgttcatatacc

SEQ ID NO: 36755 - DNA, 15 bp, Homo sapiens
catgttcatatacct

SEQ ID NO: 36756 - DNA, 15 bp, Homo sapiens
atgttcatatacctg

SEQ ID NO: 36757 - DNA, 15 bp, Homo sapiens
tgttcatatacctgt

SEQ ID NO: 36758 - DNA, 15 bp, Homo sapiens
gttcatatacctgta

SEQ ID NO: 36759 - DNA, 15 bp, Homo sapiens
ttcatatacctgtaa

SEQ ID NO: 36760 - DNA, 15 bp, Homo sapiens
tcatatacctgtaaa

SEQ ID NO: 36761 - DNA, 15 bp, Homo sapiens
catatacctgtaaaa

SEQ ID NO: 36762 - DNA, 15 bp, Homo sapiens
atatacctgtaaaag

SEQ ID NO: 36763 - DNA, 15 bp, Homo sapiens
tatacctgtaaaagc

SEQ ID NO: 36764 - DNA, 15 bp, Homo sapiens
atacctgtaaaagcc

SEQ ID NO: 36765 - DNA, 15 bp, Homo sapiens
tacctgtaaaagcca

SEQ ID NO: 36766 - DNA, 15 bp, Homo sapiens
acctgtaaaagccaa

SEQ ID NO: 36767 - DNA, 15 bp, Homo sapiens
cctgtaaaagccaaa

SEQ ID NO: 36768 - DNA, 15 bp, Homo sapiens
ctgtaaaagccaaag

SEQ ID NO: 36769 - DNA, 15 bp, Homo sapiens
tgtaaaagccaaagt

SEQ ID NO: 36770 - DNA, 15 bp, Homo sapiens
gtaaaagccaaagtt

SEQ ID NO: 36771 - DNA, 15 bp, Homo sapiens
taaaagccaaagtta

SEQ ID NO: 36772 - DNA, 15 bp, Homo sapiens
aaaagccaaagttat

SEQ ID NO: 36773 - DNA, 15 bp, Homo sapiens
aaagccaaagttata

SEQ ID NO: 36774 - DNA, 15 bp, Homo sapiens
aagccaaagttatat

SEQ ID NO: 36775 - DNA, 15 bp, Homo sapiens
agccaaagttatatc

SEQ ID NO: 36776 - DNA, 15 bp, Homo sapiens
gccaaagttatatct

SEQ ID NO: 36777 - DNA, 15 bp, Homo sapiens
ccaaagttatatctc

SEQ ID NO: 36778 - DNA, 15 bp, Homo sapiens
caaagttatatctca

SEQ ID NO: 36779 - DNA, 15 bp, Homo sapiens
aaagttatatctcag

SEQ ID NO: 36780 - DNA, 15 bp, Homo sapiens
aagttatatctcaga

SEQ ID NO: 36781 - DNA, 15 bp, Homo sapiens
agttatatctcagaa

SEQ ID NO: 36782 - DNA, 15 bp, Homo sapiens
gttatatctcagaat

SEQ ID NO: 36783 - DNA, 15 bp, Homo sapiens
ttatatctcagaata

SEQ ID NO: 36784 - DNA, 15 bp, Homo sapiens
tatatctcagaatat

SEQ ID NO: 36785 - DNA, 15 bp, Homo sapiens
atatctcagaatata

SEQ ID NO: 36786 - DNA, 15 bp, Homo sapiens
tatctcagaatatac

SEQ ID NO: 36787 - DNA, 15 bp, Homo sapiens
atctcagaatatacc

SEQ ID NO: 36788 - DNA, 15 bp, Homo sapiens
tctcagaatatacca

SEQ ID NO: 36789 - DNA, 15 bp, Homo sapiens
ctcagaatataccat

SEQ ID NO: 36790 - DNA, 15 bp, Homo sapiens
tcagaatataccatg

SEQ ID NO: 36791 - DNA, 15 bp, Homo sapiens
cagaatataccatgc

SEQ ID NO: 36792 - DNA, 15 bp, Homo sapiens
agaatataccatgct

SEQ ID NO: 36793 - DNA, 15 bp, Homo sapiens
gaatataccatgctt

SEQ ID NO: 36794 - DNA, 15 bp, Homo sapiens
aatataccatgcttg

SEQ ID NO: 36795 - DNA, 15 bp, Homo sapiens
atataccatgcttga

SEQ ID NO: 36796 - DNA, 15 bp, Homo sapiens
tataccatgcttgag

SEQ ID NO: 36797 - DNA, 15 bp, Homo sapiens
ataccatgcttgagt

SEQ ID NO: 36798 - DNA, 15 bp, Homo sapiens
taccatgcttgagtt

SEQ ID NO: 36799 - DNA, 15 bp, Homo sapiens
accatgcttgagttc

SEQ ID NO: 36800 - DNA, 15 bp, Homo sapiens
ccatgcttgagttct

SEQ ID NO: 36801 - DNA, 15 bp, Homo sapiens
catgcttgagttctc

SEQ ID NO: 36802 - DNA, 15 bp, Homo sapiens
atgcttgagttctct

SEQ ID NO: 36803 - DNA, 15 bp, Homo sapiens
tgcttgagttctctg

SEQ ID NO: 36804 - DNA, 15 bp, Homo sapiens
gcttgagttctctgt

SEQ ID NO: 36805 - DNA, 15 bp, Homo sapiens
cttgagttctctgtg

SEQ ID NO: 36806 - DNA, 15 bp, Homo sapiens
ttgagttctctgtga

SEQ ID NO: 36807 - DNA, 15 bp, Homo sapiens
tgagttctctgtgaa

SEQ ID NO: 36808 - DNA, 15 bp, Homo sapiens
gagttctctgtgaag

SEQ ID NO: 36809 - DNA, 15 bp, Homo sapiens
agttctctgtgaagt

SEQ ID NO: 36810 - DNA, 15 bp, Homo sapiens
gttctctgtgaagtt

SEQ ID NO: 36811 - DNA, 15 bp, Homo sapiens
ttctctgtgaagtta

SEQ ID NO: 36812 - DNA, 15 bp, Homo sapiens
tctctgtgaagttaa

SEQ ID NO: 36813 - DNA, 15 bp, Homo sapiens
ctctgtgaagttaaa

SEQ ID NO: 36814 - DNA, 15 bp, Homo sapiens
tctgtgaagttaaaa

SEQ ID NO: 36815 - DNA, 15 bp, Homo sapiens
ctgtgaagttaaaat

SEQ ID NO: 36816 - DNA, 15 bp, Homo sapiens
tgtgaagttaaaatt

SEQ ID NO: 36817 - DNA, 15 bp, Homo sapiens
gtgaagttaaaattt

SEQ ID NO: 36818 - DNA, 15 bp, Homo sapiens
tgaagttaaaatttc

SEQ ID NO: 36819 - DNA, 15 bp, Homo sapiens
gaagttaaaatttca

SEQ ID NO: 36820 - DNA, 15 bp, Homo sapiens
aagttaaaatttcag

SEQ ID NO: 36821 - DNA, 15 bp, Homo sapiens
agttaaaatttcagg

SEQ ID NO: 36822 - DNA, 15 bp, Homo sapiens
gttaaaatttcaggc

SEQ ID NO: 36823 - DNA, 15 bp, Homo sapiens
ttaaaatttcaggca

SEQ ID NO: 36824 - DNA, 15 bp, Homo sapiens
taaaatttcaggcaa

SEQ ID NO: 36825 - DNA, 15 bp, Homo sapiens
aaaatttcaggcaaa

SEQ ID NO: 36826 - DNA, 15 bp, Homo sapiens
aaatttcaggcaaag

SEQ ID NO: 36827 - DNA, 15 bp, Homo sapiens
aatttcaggcaaagt

SEQ ID NO: 36828 - DNA, 15 bp, Homo sapiens
atttcaggcaaagtt

SEQ ID NO: 36829 - DNA, 15 bp, Homo sapiens
tttcaggcaaagtta

SEQ ID NO: 36830 - DNA, 15 bp, Homo sapiens
ttcaggcaaagttat

SEQ ID NO: 36831 - DNA, 15 bp, Homo sapiens
tcaggcaaagttatg

SEQ ID NO: 36832 - DNA, 15 bp, Homo sapiens
caggcaaagttatgc

SEQ ID NO: 36833 - DNA, 15 bp, Homo sapiens
aggcaaagttatgca

SEQ ID NO: 36834 - DNA, 15 bp, Homo sapiens
ggcaaagttatgcat

SEQ ID NO: 36835 - DNA, 15 bp, Homo sapiens
gcaaagttatgcatc

SEQ ID NO: 36836 - DNA, 15 bp, Homo sapiens
caaagttatgcatct

SEQ ID NO: 36837 - DNA, 15 bp, Homo sapiens
aaagttatgcatctt

SEQ ID NO: 36838 - DNA, 15 bp, Homo sapiens
aagttatgcatcttt

SEQ ID NO: 36839 - DNA, 15 bp, Homo sapiens
agttatgcatcttta

SEQ ID NO: 36840 - DNA, 15 bp, Homo sapiens
gttatgcatctttat

SEQ ID NO: 36841 - DNA, 15 bp, Homo sapiens
ttatgcatctttata

SEQ ID NO: 36842 - DNA, 15 bp, Homo sapiens
tatgcatctttataa

SEQ ID NO: 36843 - DNA, 15 bp, Homo sapiens
atgcatctttataaa

SEQ ID NO: 36844 - DNA, 15 bp, Homo sapiens
tgcatctttataaaa

SEQ ID NO: 36845 - DNA, 15 bp, Homo sapiens
gcatctttataaaat

SEQ ID NO: 36846 - DNA, 15 bp, Homo sapiens
catctttataaaatg

SEQ ID NO: 36847 - DNA, 15 bp, Homo sapiens
atctttataaaatgg

SEQ ID NO: 36848 - DNA, 15 bp, Homo sapiens
tctttataaaatggt

SEQ ID NO: 36849 - DNA, 15 bp, Homo sapiens
ctttataaaatggtt

SEQ ID NO: 36850 - DNA, 15 bp, Homo sapiens
tttataaaatggttt

SEQ ID NO: 36851 - DNA, 15 bp, Homo sapiens
ttataaaatggtttt

SEQ ID NO: 36852 - DNA, 15 bp, Homo sapiens
tataaaatggtttta

SEQ ID NO: 36853 - DNA, 15 bp, Homo sapiens
ataaaatggttttat

SEQ ID NO: 36854 - DNA, 15 bp, Homo sapiens
taaaatggttttatc

SEQ ID NO: 36855 - DNA, 15 bp, Homo sapiens
aaaatggttttatca

SEQ ID NO: 36856 - DNA, 15 bp, Homo sapiens
aaatggttttatcag

SEQ ID NO: 36857 - DNA, 15 bp, Homo sapiens
aatggttttatcaga

SEQ ID NO: 36858 - DNA, 15 bp, Homo sapiens
atggttttatcagaa

SEQ ID NO: 36859 - DNA, 15 bp, Homo sapiens
tggttttatcagaaa

SEQ ID NO: 36860 - DNA, 15 bp, Homo sapiens
ggttttatcagaaat

SEQ ID NO: 36861 - DNA, 15 bp, Homo sapiens
gttttatcagaaatt

SEQ ID NO: 36862 - DNA, 15 bp, Homo sapiens
ttttatcagaaattc

SEQ ID NO: 36863 - DNA, 15 bp, Homo sapiens
tttatcagaaattcc

SEQ ID NO: 36864 - DNA, 15 bp, Homo sapiens
ttatcagaaattcca

SEQ ID NO: 36865 - DNA, 15 bp, Homo sapiens
tatcagaaattccaa

SEQ ID NO: 36866 - DNA, 15 bp, Homo sapiens
atcagaaattccaaa

SEQ ID NO: 36867 - DNA, 15 bp, Homo sapiens
tcagaaattccaaaa

SEQ ID NO: 36868 - DNA, 15 bp, Homo sapiens
cagaaattccaaaaa

SEQ ID NO: 36869 - DNA, 15 bp, Homo sapiens
agaaattccaaaaat

SEQ ID NO: 36870 - DNA, 15 bp, Homo sapiens
gaaattccaaaaatg

SEQ ID NO: 36871 - DNA, 15 bp, Homo sapiens
aaattccaaaaatga

SEQ ID NO: 36872 - DNA, 15 bp, Homo sapiens
aattccaaaaatgag

SEQ ID NO: 36873 - DNA, 15 bp, Homo sapiens
attccaaaaatgaga

SEQ ID NO: 36874 - DNA, 15 bp, Homo sapiens
ttccaaaaatgagag

SEQ ID NO: 36875 - DNA, 15 bp, Homo sapiens
tccaaaaatgagagg

SEQ ID NO: 36876 - DNA, 15 bp, Homo sapiens
ccaaaaatgagaggg

SEQ ID NO: 36877 - DNA, 15 bp, Homo sapiens
caaaaatgagaggga

SEQ ID NO: 36878 - DNA, 15 bp, Homo sapiens
aaaaatgagagggac

SEQ ID NO: 36879 - DNA, 15 bp, Homo sapiens
aaaatgagagggact

SEQ ID NO: 36880 - DNA, 15 bp, Homo sapiens
aaatgagagggactg

SEQ ID NO: 36881 - DNA, 15 bp, Homo sapiens
aatgagagggactgg

SEQ ID NO: 36882 - DNA, 15 bp, Homo sapiens
atgagagggactggt

SEQ ID NO: 36883 - DNA, 15 bp, Homo sapiens
tgagagggactggtt

SEQ ID NO: 36884 - DNA, 15 bp, Homo sapiens
gagagggactggttt

SEQ ID NO: 36885 - DNA, 15 bp, Homo sapiens
agagggactggtttt

SEQ ID NO: 36886 - DNA, 15 bp, Homo sapiens
gagggactggtttta

SEQ ID NO: 36887 - DNA, 15 bp, Homo sapiens
agggactggttttaa

SEQ ID NO: 36888 - DNA, 15 bp, Homo sapiens
gggactggttttaat

SEQ ID NO: 36889 - DNA, 15 bp, Homo sapiens
ggactggttttaatg

SEQ ID NO: 36890 - DNA, 15 bp, Homo sapiens
gactggttttaatgt

SEQ ID NO: 36891 - DNA, 15 bp, Homo sapiens
actggttttaatgtt

SEQ ID NO: 36892 - DNA, 15 bp, Homo sapiens
ctggttttaatgttt

SEQ ID NO: 36893 - DNA, 15 bp, Homo sapiens
tggttttaatgtttt

SEQ ID NO: 36894 - DNA, 15 bp, Homo sapiens
ggttttaatgttttc

SEQ ID NO: 36895 - DNA, 15 bp, Homo sapiens
gttttaatgttttct

SEQ ID NO: 36896 - DNA, 15 bp, Homo sapiens
ttttaatgttttcta

SEQ ID NO: 36897 - DNA, 15 bp, Homo sapiens
tttaatgttttctaa

SEQ ID NO: 36898 - DNA, 15 bp, Homo sapiens
ttaatgttttctaaa

SEQ ID NO: 36899 - DNA, 15 bp, Homo sapiens
taatgttttctaaag

SEQ ID NO: 36900 - DNA, 15 bp, Homo sapiens
aatgttttctaaagt

SEQ ID NO: 36901 - DNA, 15 bp, Homo sapiens
atgttttctaaagtt

SEQ ID NO: 36902 - DNA, 15 bp, Homo sapiens
tgttttctaaagttt

SEQ ID NO: 36903 - DNA, 15 bp, Homo sapiens
gttttctaaagtttt

SEQ ID NO: 36904 - DNA, 15 bp, Homo sapiens
ttttctaaagttttt

SEQ ID NO: 36905 - DNA, 15 bp, Homo sapiens
tttctaaagtttttc

SEQ ID NO: 36906 - DNA, 15 bp, Homo sapiens
ttctaaagtttttct

SEQ ID NO: 36907 - DNA, 15 bp, Homo sapiens
tctaaagtttttctt

SEQ ID NO: 36908 - DNA, 15 bp, Homo sapiens
ctaaagtttttctta

SEQ ID NO: 36909 - DNA, 15 bp, Homo sapiens
taaagtttttcttaa

SEQ ID NO: 36910 - DNA, 15 bp, Homo sapiens
aaagtttttcttaag

SEQ ID NO: 36911 - DNA, 15 bp, Homo sapiens
aagtttttcttaaga

SEQ ID NO: 36912 - DNA, 15 bp, Homo sapiens
agtttttcttaagaa

SEQ ID NO: 36913 - DNA, 15 bp, Homo sapiens
gtttttcttaagaaa

SEQ ID NO: 36914 - DNA, 15 bp, Homo sapiens
tttttcttaagaaat

SEQ ID NO: 36915 - DNA, 15 bp, Homo sapiens
ttttcttaagaaatg

SEQ ID NO: 36916 - DNA, 15 bp, Homo sapiens
tttcttaagaaatgt

SEQ ID NO: 36917 - DNA, 15 bp, Homo sapiens
ttcttaagaaatgtt

SEQ ID NO: 36918 - DNA, 15 bp, Homo sapiens
tcttaagaaatgttg

SEQ ID NO: 36919 - DNA, 15 bp, Homo sapiens
cttaagaaatgttga

SEQ ID NO: 36920 - DNA, 15 bp, Homo sapiens
ttaagaaatgttgaa

SEQ ID NO: 36921 - DNA, 15 bp, Homo sapiens
taagaaatgttgaac

SEQ ID NO: 36922 - DNA, 15 bp, Homo sapiens
aagaaatgttgaacc

SEQ ID NO: 36923 - DNA, 15 bp, Homo sapiens
agaaatgttgaaccc

SEQ ID NO: 36924 - DNA, 15 bp, Homo sapiens
gaaatgttgaaccca

SEQ ID NO: 36925 - DNA, 15 bp, Homo sapiens
aaatgttgaacccaa

SEQ ID NO: 36926 - DNA, 15 bp, Homo sapiens
aatgttgaacccaaa

SEQ ID NO: 36927 - DNA, 15 bp, Homo sapiens
atgttgaacccaaat

SEQ ID NO: 36928 - DNA, 15 bp, Homo sapiens
tgttgaacccaaatt

SEQ ID NO: 36929 - DNA, 15 bp, Homo sapiens
gttgaacccaaattt

SEQ ID NO: 36930 - DNA, 15 bp, Homo sapiens
ttgaacccaaattta

SEQ ID NO: 36931 - DNA, 15 bp, Homo sapiens
tgaacccaaatttag

SEQ ID NO: 36932 - DNA, 15 bp, Homo sapiens
gaacccaaatttaga

SEQ ID NO: 36933 - DNA, 15 bp, Homo sapiens
aacccaaatttagag

SEQ ID NO: 36934 - DNA, 15 bp, Homo sapiens
acccaaatttagagt

SEQ ID NO: 36935 - DNA, 15 bp, Homo sapiens
cccaaatttagagta

SEQ ID NO: 36936 - DNA, 15 bp, Homo sapiens
ccaaatttagagtat

SEQ ID NO: 36937 - DNA, 15 bp, Homo sapiens
caaatttagagtatt

SEQ ID NO: 36938 - DNA, 15 bp, Homo sapiens
aaatttagagtatta

SEQ ID NO: 36939 - DNA, 15 bp, Homo sapiens
aatttagagtattat

SEQ ID NO: 36940 - DNA, 15 bp, Homo sapiens
atttagagtattatc

SEQ ID NO: 36941 - DNA, 15 bp, Homo sapiens
tttagagtattatct

SEQ ID NO: 36942 - DNA, 15 bp, Homo sapiens
ttagagtattatctg

SEQ ID NO: 36943 - DNA, 15 bp, Homo sapiens
tagagtattatctga

SEQ ID NO: 36944 - DNA, 15 bp, Homo sapiens
agagtattatctgac

SEQ ID NO: 36945 - DNA, 15 bp, Homo sapiens
gagtattatctgacc

SEQ ID NO: 36946 - DNA, 15 bp, Homo sapiens
agtattatctgacct

SEQ ID NO: 36947 - DNA, 15 bp, Homo sapiens
gtattatctgaccta

SEQ ID NO: 36948 - DNA, 15 bp, Homo sapiens
tattatctgacctaa

SEQ ID NO: 36949 - DNA, 15 bp, Homo sapiens
attatctgacctaat

SEQ ID NO: 36950 - DNA, 15 bp, Homo sapiens
ttatctgacctaatt

SEQ ID NO: 36951 - DNA, 15 bp, Homo sapiens
tatctgacctaatta

SEQ ID NO: 36952 - DNA, 15 bp, Homo sapiens
atctgacctaattaa

SEQ ID NO: 36953 - DNA, 15 bp, Homo sapiens
tctgacctaattaac

SEQ ID NO: 36954 - DNA, 15 bp, Homo sapiens
ctgacctaattaact

SEQ ID NO: 36955 - DNA, 15 bp, Homo sapiens
tgacctaattaactc

SEQ ID NO: 36956 - DNA, 15 bp, Homo sapiens
gacctaattaactca

SEQ ID NO: 36957 - DNA, 15 bp, Homo sapiens
acctaattaactcaa

SEQ ID NO: 36958 - DNA, 15 bp, Homo sapiens
cctaattaactcaaa

SEQ ID NO: 36959 - DNA, 15 bp, Homo sapiens
ctaattaactcaaat

SEQ ID NO: 36960 - DNA, 15 bp, Homo sapiens
taattaactcaaatt

SEQ ID NO: 36961 - DNA, 15 bp, Homo sapiens
aattaactcaaattt

SEQ ID NO: 36962 - DNA, 15 bp, Homo sapiens
attaactcaaatttt

SEQ ID NO: 36963 - DNA, 15 bp, Homo sapiens
ttaactcaaattttt

SEQ ID NO: 36964 - DNA, 15 bp, Homo sapiens
taactcaaatttttg

SEQ ID NO: 36965 - DNA, 15 bp, Homo sapiens
aactcaaatttttgt

SEQ ID NO: 36966 - DNA, 15 bp, Homo sapiens
actcaaatttttgta

SEQ ID NO: 36967 - DNA, 15 bp, Homo sapiens
ctcaaatttttgtaa

SEQ ID NO: 36968 - DNA, 15 bp, Homo sapiens
tcaaatttttgtaaa

SEQ ID NO: 36969 - DNA, 15 bp, Homo sapiens
caaatttttgtaaat

SEQ ID NO: 36970 - DNA, 15 bp, Homo sapiens
aaatttttgtaaatt

SEQ ID NO: 36971 - DNA, 15 bp, Homo sapiens
aatttttgtaaattt

SEQ ID NO: 36972 - DNA, 15 bp, Homo sapiens
atttttgtaaatttt

SEQ ID NO: 36973 - DNA, 15 bp, Homo sapiens
tttttgtaaatttta

SEQ ID NO: 36974 - DNA, 15 bp, Homo sapiens
ttttgtaaattttaa

SEQ ID NO: 36975 - DNA, 15 bp, Homo sapiens
tttgtaaattttaat

SEQ ID NO: 36976 - DNA, 15 bp, Homo sapiens
ttgtaaattttaatg

SEQ ID NO: 36977 - DNA, 15 bp, Homo sapiens
tgtaaattttaatga

SEQ ID NO: 36978 - DNA, 15 bp, Homo sapiens
gtaaattttaatgat

SEQ ID NO: 36979 - DNA, 15 bp, Homo sapiens
taaattttaatgatg

SEQ ID NO: 36980 - DNA, 15 bp, Homo sapiens
aaattttaatgatgt

SEQ ID NO: 36981 - DNA, 15 bp, Homo sapiens
aattttaatgatgtt

SEQ ID NO: 36982 - DNA, 15 bp, Homo sapiens
attttaatgatgttt

SEQ ID NO: 36983 - DNA, 15 bp, Homo sapiens
ttttaatgatgttta

SEQ ID NO: 36984 - DNA, 15 bp, Homo sapiens
tttaatgatgtttac

SEQ ID NO: 36985 - DNA, 15 bp, Homo sapiens
ttaatgatgtttact

SEQ ID NO: 36986 - DNA, 15 bp, Homo sapiens
taatgatgtttactc

SEQ ID NO: 36987 - DNA, 15 bp, Homo sapiens
aatgatgtttactca

SEQ ID NO: 36988 - DNA, 15 bp, Homo sapiens
atgatgtttactcac

SEQ ID NO: 36989 - DNA, 15 bp, Homo sapiens
tgatgtttactcacc

SEQ ID NO: 36990 - DNA, 15 bp, Homo sapiens
gatgtttactcacct

SEQ ID NO: 36991 - DNA, 15 bp, Homo sapiens
atgtttactcacctc

SEQ ID NO: 36992 - DNA, 15 bp, Homo sapiens
tgtttactcacctct

SEQ ID NO: 36993 - DNA, 15 bp, Homo sapiens
gtttactcacctctc

SEQ ID NO: 36994 - DNA, 15 bp, Homo sapiens
tttactcacctctct

SEQ ID NO: 36995 - DNA, 15 bp, Homo sapiens
ttactcacctctctc

SEQ ID NO: 36996 - DNA, 15 bp, Homo sapiens
tactcacctctctca

SEQ ID NO: 36997 - DNA, 15 bp, Homo sapiens
actcacctctctcac

SEQ ID NO: 36998 - DNA, 15 bp, Homo sapiens
ctcacctctctcaca

SEQ ID NO: 36999 - DNA, 15 bp, Homo sapiens
tcacctctctcacag

SEQ ID NO: 37000 - DNA, 15 bp, Homo sapiens
cacctctctcacagc

SEQ ID NO: 37001 - DNA, 15 bp, Homo sapiens
acctctctcacagca

SEQ ID NO: 37002 - DNA, 15 bp, Homo sapiens
cctctctcacagcat

SEQ ID NO: 37003 - DNA, 15 bp, Homo sapiens
ctctctcacagcatt

SEQ ID NO: 37004 - DNA, 15 bp, Homo sapiens
tctctcacagcattg

SEQ ID NO: 37005 - DNA, 15 bp, Homo sapiens
ctctcacagcattgc

SEQ ID NO: 37006 - DNA, 15 bp, Homo sapiens
tctcacagcattgca

SEQ ID NO: 37007 - DNA, 15 bp, Homo sapiens
ctcacagcattgcag

SEQ ID NO: 37008 - DNA, 15 bp, Homo sapiens
tcacagcattgcaga

SEQ ID NO: 37009 - DNA, 15 bp, Homo sapiens
cacagcattgcagaa

SEQ ID NO: 37010 - DNA, 15 bp, Homo sapiens
acagcattgcagaat

SEQ ID NO: 37011 - DNA, 15 bp, Homo sapiens
cagcattgcagaatt

SEQ ID NO: 37012 - DNA, 15 bp, Homo sapiens
agcattgcagaattc

SEQ ID NO: 37013 - DNA, 15 bp, Homo sapiens
gcattgcagaattca

SEQ ID NO: 37014 - DNA, 15 bp, Homo sapiens
cattgcagaattcac

SEQ ID NO: 37015 - DNA, 15 bp, Homo sapiens
attgcagaattcact

SEQ ID NO: 37016 - DNA, 15 bp, Homo sapiens
ttgcagaattcactt

SEQ ID NO: 37017 - DNA, 15 bp, Homo sapiens
tgcagaattcacttt

SEQ ID NO: 37018 - DNA, 15 bp, Homo sapiens
gcagaattcactttg

SEQ ID NO: 37019 - DNA, 15 bp, Homo sapiens
cagaattcactttga

SEQ ID NO: 37020 - DNA, 15 bp, Homo sapiens
agaattcactttgaa

SEQ ID NO: 37021 - DNA, 15 bp, Homo sapiens
gaattcactttgaag

SEQ ID NO: 37022 - DNA, 15 bp, Homo sapiens
aattcactttgaagg

SEQ ID NO: 37023 - DNA, 15 bp, Homo sapiens
attcactttgaagga

SEQ ID NO: 37024 - DNA, 15 bp, Homo sapiens
ttcactttgaaggac

SEQ ID NO: 37025 - DNA, 15 bp, Homo sapiens
tcactttgaaggact

SEQ ID NO: 37026 - DNA, 15 bp, Homo sapiens
cactttgaaggactc

SEQ ID NO: 37027 - DNA, 15 bp, Homo sapiens
actttgaaggactct

SEQ ID NO: 37028 - DNA, 15 bp, Homo sapiens
ctttgaaggactctt

SEQ ID NO: 37029 - DNA, 15 bp, Homo sapiens
tttgaaggactcttt

SEQ ID NO: 37030 - DNA, 15 bp, Homo sapiens
ttgaaggactctttg

SEQ ID NO: 37031 - DNA, 15 bp, Homo sapiens
tgaaggactctttgc

SEQ ID NO: 37032 - DNA, 15 bp, Homo sapiens
gaaggactctttgca

SEQ ID NO: 37033 - DNA, 15 bp, Homo sapiens
aaggactctttgcaa

SEQ ID NO: 37034 - DNA, 15 bp, Homo sapiens
aggactctttgcaaa

SEQ ID NO: 37035 - DNA, 15 bp, Homo sapiens
ggactctttgcaaag

SEQ ID NO: 37036 - DNA, 15 bp, Homo sapiens
gactctttgcaaagc

SEQ ID NO: 37037 - DNA, 15 bp, Homo sapiens
actctttgcaaagcc

SEQ ID NO: 37038 - DNA, 15 bp, Homo sapiens
ctctttgcaaagcct

SEQ ID NO: 37039 - DNA, 15 bp, Homo sapiens
tctttgcaaagcctg

SEQ ID NO: 37040 - DNA, 15 bp, Homo sapiens
ctttgcaaagcctga

SEQ ID NO: 37041 - DNA, 15 bp, Homo sapiens
tttgcaaagcctgaa

SEQ ID NO: 37042 - DNA, 15 bp, Homo sapiens
ttgcaaagcctgaag

SEQ ID NO: 37043 - DNA, 15 bp, Homo sapiens
tgcaaagcctgaagt

SEQ ID NO: 37044 - DNA, 15 bp, Homo sapiens
gcaaagcctgaagtt

SEQ ID NO: 37045 - DNA, 15 bp, Homo sapiens
caaagcctgaagttt

SEQ ID NO: 37046 - DNA, 15 bp, Homo sapiens
aaagcctgaagtttc

SEQ ID NO: 37047 - DNA, 15 bp, Homo sapiens
aagcctgaagtttct

SEQ ID NO: 37048 - DNA, 15 bp, Homo sapiens
agcctgaagtttctg

SEQ ID NO: 37049 - DNA, 15 bp, Homo sapiens
gcctgaagtttctgt

SEQ ID NO: 37050 - DNA, 15 bp, Homo sapiens
cctgaagtttctgtg

SEQ ID NO: 37051 - DNA, 15 bp, Homo sapiens
ctgaagtttctgtgg

SEQ ID NO: 37052 - DNA, 15 bp, Homo sapiens
tgaagtttctgtggt

SEQ ID NO: 37053 - DNA, 15 bp, Homo sapiens
gaagtttctgtggtg

SEQ ID NO: 37054 - DNA, 15 bp, Homo sapiens
aagtttctgtggtgg

SEQ ID NO: 37055 - DNA, 15 bp, Homo sapiens
agtttctgtggtggt

SEQ ID NO: 37056 - DNA, 15 bp, Homo sapiens
gtttctgtggtggta

SEQ ID NO: 37057 - DNA, 15 bp, Homo sapiens
tttctgtggtggtac

SEQ ID NO: 37058 - DNA, 15 bp, Homo sapiens
ttctgtggtggtact

SEQ ID NO: 37059 - DNA, 15 bp, Homo sapiens
tctgtggtggtactt

SEQ ID NO: 37060 - DNA, 15 bp, Homo sapiens
ctgtggtggtacttc

SEQ ID NO: 37061 - DNA, 15 bp, Homo sapiens
tgtggtggtacttct

SEQ ID NO: 37062 - DNA, 15 bp, Homo sapiens
gtggtggtacttctc

SEQ ID NO: 37063 - DNA, 15 bp, Homo sapiens
tggtggtacttctcc

SEQ ID NO: 37064 - DNA, 15 bp, Homo sapiens
ggtggtacttctcca

SEQ ID NO: 37065 - DNA, 15 bp, Homo sapiens
gtggtacttctccac

SEQ ID NO: 37066 - DNA, 15 bp, Homo sapiens
tggtacttctccact

SEQ ID NO: 37067 - DNA, 15 bp, Homo sapiens
ggtacttctccactc

SEQ ID NO: 37068 - DNA, 15 bp, Homo sapiens
gtacttctccactcc

SEQ ID NO: 37069 - DNA, 15 bp, Homo sapiens
tacttctccactcct

SEQ ID NO: 37070 - DNA, 15 bp, Homo sapiens
acttctccactcctt

SEQ ID NO: 37071 - DNA, 15 bp, Homo sapiens
cttctccactccttt

SEQ ID NO: 37072 - DNA, 15 bp, Homo sapiens
ttctccactcctttg

SEQ ID NO: 37073 - DNA, 15 bp, Homo sapiens
tctccactcctttgt

SEQ ID NO: 37074 - DNA, 15 bp, Homo sapiens
ctccactcctttgta

SEQ ID NO: 37075 - DNA, 15 bp, Homo sapiens
tccactcctttgtag

SEQ ID NO: 37076 - DNA, 15 bp, Homo sapiens
ccactcctttgtagt

SEQ ID NO: 37077 - DNA, 15 bp, Homo sapiens
cactcctttgtagtt

SEQ ID NO: 37078 - DNA, 15 bp, Homo sapiens
actcctttgtagttt

SEQ ID NO: 37079 - DNA, 15 bp, Homo sapiens
ctcctttgtagtttt

SEQ ID NO: 37080 - DNA, 15 bp, Homo sapiens
tcctttgtagttttt

SEQ ID NO: 37081 - DNA, 15 bp, Homo sapiens
cctttgtagtttttc

SEQ ID NO: 37082 - DNA, 15 bp, Homo sapiens
ctttgtagtttttcc

SEQ ID NO: 37083 - DNA, 15 bp, Homo sapiens
tttgtagtttttcca

SEQ ID NO: 37084 - DNA, 15 bp, Homo sapiens
ttgtagtttttccaa

SEQ ID NO: 37085 - DNA, 15 bp, Homo sapiens
tgtagtttttccaat

SEQ ID NO: 37086 - DNA, 15 bp, Homo sapiens
gtagtttttccaata

SEQ ID NO: 37087 - DNA, 15 bp, Homo sapiens
tagtttttccaataa

SEQ ID NO: 37088 - DNA, 15 bp, Homo sapiens
agtttttccaataat

SEQ ID NO: 37089 - DNA, 15 bp, Homo sapiens
gtttttccaataatt

SEQ ID NO: 37090 - DNA, 15 bp, Homo sapiens
tttttccaataattc

SEQ ID NO: 37091 - DNA, 15 bp, Homo sapiens
ttttccaataattca

SEQ ID NO: 37092 - DNA, 15 bp, Homo sapiens
tttccaataattcaa

SEQ ID NO: 37093 - DNA, 15 bp, Homo sapiens
ttccaataattcaat

SEQ ID NO: 37094 - DNA, 15 bp, Homo sapiens
tccaataattcaatt

SEQ ID NO: 37095 - DNA, 15 bp, Homo sapiens
ccaataattcaattg

SEQ ID NO: 37096 - DNA, 15 bp, Homo sapiens
caataattcaattgc

SEQ ID NO: 37097 - DNA, 15 bp, Homo sapiens
aataattcaattgct

SEQ ID NO: 37098 - DNA, 15 bp, Homo sapiens
ataattcaattgctc

SEQ ID NO: 37099 - DNA, 15 bp, Homo sapiens
taattcaattgctct

SEQ ID NO: 37100 - DNA, 15 bp, Homo sapiens
aattcaattgctcta

SEQ ID NO: 37101 - DNA, 15 bp, Homo sapiens
attcaattgctctac

SEQ ID NO: 37102 - DNA, 15 bp, Homo sapiens
ttcaattgctctaca

SEQ ID NO: 37103 - DNA, 15 bp, Homo sapiens
tcaattgctctacaa

SEQ ID NO: 37104 - DNA, 15 bp, Homo sapiens
caattgctctacaaa

SEQ ID NO: 37105 - DNA, 15 bp, Homo sapiens
aattgctctacaaat

SEQ ID NO: 37106 - DNA, 15 bp, Homo sapiens
attgctctacaaata

SEQ ID NO: 37107 - DNA, 15 bp, Homo sapiens
ttgctctacaaatat

SEQ ID NO: 37108 - DNA, 15 bp, Homo sapiens
tgctctacaaatatc

SEQ ID NO: 37109 - DNA, 15 bp, Homo sapiens
gctctacaaatatct

SEQ ID NO: 37110 - DNA, 15 bp, Homo sapiens
ctctacaaatatcta

SEQ ID NO: 37111 - DNA, 15 bp, Homo sapiens
tctacaaatatctag

SEQ ID NO: 37112 - DNA, 15 bp, Homo sapiens
ctacaaatatctaga

SEQ ID NO: 37113 - DNA, 15 bp, Homo sapiens
tacaaatatctagag

SEQ ID NO: 37114 - DNA, 15 bp, Homo sapiens
acaaatatctagagt

SEQ ID NO: 37115 - DNA, 15 bp, Homo sapiens
caaatatctagagtt

SEQ ID NO: 37116 - DNA, 15 bp, Homo sapiens
aaatatctagagtta

SEQ ID NO: 37117 - DNA, 15 bp, Homo sapiens
aatatctagagttaa

SEQ ID NO: 37118 - DNA, 15 bp, Homo sapiens
atatctagagttaaa

SEQ ID NO: 37119 - DNA, 15 bp, Homo sapiens
tatctagagttaaac

SEQ ID NO: 37120 - DNA, 15 bp, Homo sapiens
atctagagttaaaca

SEQ ID NO: 37121 - DNA, 15 bp, Homo sapiens
tctagagttaaacac

SEQ ID NO: 37122 - DNA, 15 bp, Homo sapiens
ctagagttaaacaca

SEQ ID NO: 37123 - DNA, 15 bp, Homo sapiens
tagagttaaacacac

SEQ ID NO: 37124 - DNA, 15 bp, Homo sapiens
agagttaaacacaca

SEQ ID NO: 37125 - DNA, 15 bp, Homo sapiens
gagttaaacacacac

SEQ ID NO: 37126 - DNA, 15 bp, Homo sapiens
agttaaacacacaca

SEQ ID NO: 37127 - DNA, 15 bp, Homo sapiens
gttaaacacacacac

SEQ ID NO: 37128 - DNA, 15 bp, Homo sapiens
ttaaacacacacaca

SEQ ID NO: 37129 - DNA, 15 bp, Homo sapiens
taaacacacacacag

SEQ ID NO: 37130 - DNA, 15 bp, Homo sapiens
aaacacacacacaga

SEQ ID NO: 37131 - DNA, 15 bp, Homo sapiens
aacacacacacagat

SEQ ID NO: 37132 - DNA, 15 bp, Homo sapiens
acacacacacagata

SEQ ID NO: 37133 - DNA, 15 bp, Homo sapiens
cacacacacagataa

SEQ ID NO: 37134 - DNA, 15 bp, Homo sapiens
acacacacagataat

SEQ ID NO: 37135 - DNA, 15 bp, Homo sapiens
cacacacagataatt

SEQ ID NO: 37136 - DNA, 15 bp, Homo sapiens
acacacagataattt

SEQ ID NO: 37137 - DNA, 15 bp, Homo sapiens
cacacagataatttt

SEQ ID NO: 37138 - DNA, 15 bp, Homo sapiens
acacagataattttc

SEQ ID NO: 37139 - DNA, 15 bp, Homo sapiens
cacagataattttct

SEQ ID NO: 37140 - DNA, 15 bp, Homo sapiens
acagataattttctc

SEQ ID NO: 37141 - DNA, 15 bp, Homo sapiens
cagataattttctcc

SEQ ID NO: 37142 - DNA, 15 bp, Homo sapiens
agataattttctcca

SEQ ID NO: 37143 - DNA, 15 bp, Homo sapiens
gataattttctccaa

SEQ ID NO: 37144 - DNA, 15 bp, Homo sapiens
ataattttctccaag

SEQ ID NO: 37145 - DNA, 15 bp, Homo sapiens
taattttctccaagg

SEQ ID NO: 37146 - DNA, 15 bp, Homo sapiens
aattttctccaaggg

SEQ ID NO: 37147 - DNA, 15 bp, Homo sapiens
attttctccaagggt

SEQ ID NO: 37148 - DNA, 15 bp, Homo sapiens
ttttctccaagggtt

SEQ ID NO: 37149 - DNA, 15 bp, Homo sapiens
tttctccaagggttt

SEQ ID NO: 37150 - DNA, 15 bp, Homo sapiens
ttctccaagggtttt

SEQ ID NO: 37151 - DNA, 15 bp, Homo sapiens
tctccaagggttttc

SEQ ID NO: 37152 - DNA, 15 bp, Homo sapiens
ctccaagggttttct

SEQ ID NO: 37153 - DNA, 15 bp, Homo sapiens
tccaagggttttctc

SEQ ID NO: 37154 - DNA, 15 bp, Homo sapiens
ccaagggttttctca

SEQ ID NO: 37155 - DNA, 15 bp, Homo sapiens
caagggttttctcaa

SEQ ID NO: 37156 - DNA, 15 bp, Homo sapiens
aagggttttctcaat

SEQ ID NO: 37157 - DNA, 15 bp, Homo sapiens
agggttttctcaatg

SEQ ID NO: 37158 - DNA, 15 bp, Homo sapiens
gggttttctcaatgc

SEQ ID NO: 37159 - DNA, 15 bp, Homo sapiens
ggttttctcaatgcc

SEQ ID NO: 37160 - DNA, 15 bp, Homo sapiens
gttttctcaatgcct

SEQ ID NO: 37161 - DNA, 15 bp, Homo sapiens
ttttctcaatgccta

SEQ ID NO: 37162 - DNA, 15 bp, Homo sapiens
tttctcaatgcctat

SEQ ID NO: 37163 - DNA, 15 bp, Homo sapiens
ttctcaatgcctatg

SEQ ID NO: 37164 - DNA, 15 bp, Homo sapiens
tctcaatgcctatgt

SEQ ID NO: 37165 - DNA, 15 bp, Homo sapiens
ctcaatgcctatgta

SEQ ID NO: 37166 - DNA, 15 bp, Homo sapiens
tcaatgcctatgtaa

SEQ ID NO: 37167 - DNA, 15 bp, Homo sapiens
caatgcctatgtaac

SEQ ID NO: 37168 - DNA, 15 bp, Homo sapiens
aatgcctatgtaaca

SEQ ID NO: 37169 - DNA, 15 bp, Homo sapiens
atgcctatgtaacag

SEQ ID NO: 37170 - DNA, 15 bp, Homo sapiens
tgcctatgtaacagt

SEQ ID NO: 37171 - DNA, 15 bp, Homo sapiens
gcctatgtaacagtg

SEQ ID NO: 37172 - DNA, 15 bp, Homo sapiens
cctatgtaacagtgg

SEQ ID NO: 37173 - DNA, 15 bp, Homo sapiens
ctatgtaacagtggg

SEQ ID NO: 37174 - DNA, 15 bp, Homo sapiens
tatgtaacagtgggg

SEQ ID NO: 37175 - DNA, 15 bp, Homo sapiens
atgtaacagtggggc

SEQ ID NO: 37176 - DNA, 15 bp, Homo sapiens
tgtaacagtggggca

SEQ ID NO: 37177 - DNA, 15 bp, Homo sapiens
gtaacagtggggcag

SEQ ID NO: 37178 - DNA, 15 bp, Homo sapiens
taacagtggggcagt

SEQ ID NO: 37179 - DNA, 15 bp, Homo sapiens
aacagtggggcagtt

SEQ ID NO: 37180 - DNA, 15 bp, Homo sapiens
acagtggggcagtta

SEQ ID NO: 37181 - DNA, 15 bp, Homo sapiens
cagtggggcagttag

SEQ ID NO: 37182 - DNA, 15 bp, Homo sapiens
agtggggcagttagg

SEQ ID NO: 37183 - DNA, 15 bp, Homo sapiens
gtggggcagttagga

SEQ ID NO: 37184 - DNA, 15 bp, Homo sapiens
tggggcagttaggat

SEQ ID NO: 37185 - DNA, 15 bp, Homo sapiens
ggggcagttaggatt

SEQ ID NO: 37186 - DNA, 15 bp, Homo sapiens
gggcagttaggattc

SEQ ID NO: 37187 - DNA, 15 bp, Homo sapiens
ggcagttaggattca

SEQ ID NO: 37188 - DNA, 15 bp, Homo sapiens
gcagttaggattcat

SEQ ID NO: 37189 - DNA, 15 bp, Homo sapiens
cagttaggattcatt

SEQ ID NO: 37190 - DNA, 15 bp, Homo sapiens
agttaggattcattc

SEQ ID NO: 37191 - DNA, 15 bp, Homo sapiens
gttaggattcattcc

SEQ ID NO: 37192 - DNA, 15 bp, Homo sapiens
ttaggattcattcct

SEQ ID NO: 37193 - DNA, 15 bp, Homo sapiens
taggattcattcctc

SEQ ID NO: 37194 - DNA, 15 bp, Homo sapiens
aggattcattcctca

SEQ ID NO: 37195 - DNA, 15 bp, Homo sapiens
ggattcattcctcaa

SEQ ID NO: 37196 - DNA, 15 bp, Homo sapiens
gattcattcctcaag

SEQ ID NO: 37197 - DNA, 15 bp, Homo sapiens
attcattcctcaagg

SEQ ID NO: 37198 - DNA, 15 bp, Homo sapiens
ttcattcctcaaggg

SEQ ID NO: 37199 - DNA, 15 bp, Homo sapiens
tcattcctcaagggc

SEQ ID NO: 37200 - DNA, 15 bp, Homo sapiens
cattcctcaagggca

SEQ ID NO: 37201 - DNA, 15 bp, Homo sapiens
attcctcaagggcaa

SEQ ID NO: 37202 - DNA, 15 bp, Homo sapiens
ttcctcaagggcaaa

SEQ ID NO: 37203 - DNA, 15 bp, Homo sapiens
tcctcaagggcaaat

SEQ ID NO: 37204 - DNA, 15 bp, Homo sapiens
cctcaagggcaaata

SEQ ID NO: 37205 - DNA, 15 bp, Homo sapiens
ctcaagggcaaataa

SEQ ID NO: 37206 - DNA, 15 bp, Homo sapiens
tcaagggcaaataat

SEQ ID NO: 37207 - DNA, 15 bp, Homo sapiens
caagggcaaataata

SEQ ID NO: 37208 - DNA, 15 bp, Homo sapiens
aagggcaaataatat

SEQ ID NO: 37209 - DNA, 15 bp, Homo sapiens
agggcaaataatata

SEQ ID NO: 37210 - DNA, 15 bp, Homo sapiens
gggcaaataatatac

SEQ ID NO: 37211 - DNA, 15 bp, Homo sapiens
ggcaaataatataca

SEQ ID NO: 37212 - DNA, 15 bp, Homo sapiens
gcaaataatatacag

SEQ ID NO: 37213 - DNA, 15 bp, Homo sapiens
caaataatatacaga

SEQ ID NO: 37214 - DNA, 15 bp, Homo sapiens
aaataatatacagac

SEQ ID NO: 37215 - DNA, 15 bp, Homo sapiens
aataatatacagaca

SEQ ID NO: 37216 - DNA, 15 bp, Homo sapiens
ataatatacagacaa

SEQ ID NO: 37217 - DNA, 15 bp, Homo sapiens
taatatacagacaat

SEQ ID NO: 37218 - DNA, 15 bp, Homo sapiens
aatatacagacaatc

SEQ ID NO: 37219 - DNA, 15 bp, Homo sapiens
atatacagacaatcg

SEQ ID NO: 37220 - DNA, 15 bp, Homo sapiens
tatacagacaatcga

SEQ ID NO: 37221 - DNA, 15 bp, Homo sapiens
atacagacaatcgag

SEQ ID NO: 37222 - DNA, 15 bp, Homo sapiens
tacagacaatcgagg

SEQ ID NO: 37223 - DNA, 15 bp, Homo sapiens
acagacaatcgaggg

SEQ ID NO: 37224 - DNA, 15 bp, Homo sapiens
cagacaatcgagggg

SEQ ID NO: 37225 - DNA, 15 bp, Homo sapiens
agacaatcgagggga

SEQ ID NO: 37226 - DNA, 15 bp, Homo sapiens
gacaatcgaggggaa

SEQ ID NO: 37227 - DNA, 15 bp, Homo sapiens
acaatcgaggggaaa

SEQ ID NO: 37228 - DNA, 15 bp, Homo sapiens
caatcgaggggaaaa

SEQ ID NO: 37229 - DNA, 15 bp, Homo sapiens
aatcgaggggaaaaa

SEQ ID NO: 37230 - DNA, 15 bp, Homo sapiens
atcgaggggaaaaaa

SEQ ID NO: 37231 - DNA, 15 bp, Homo sapiens
tcgaggggaaaaaaa

SEQ ID NO: 37232 - DNA, 15 bp, Homo sapiens
cgaggggaaaaaaag

SEQ ID NO: 37233 - DNA, 15 bp, Homo sapiens
gaggggaaaaaaagc

SEQ ID NO: 37234 - DNA, 15 bp, Homo sapiens
aggggaaaaaaagca

SEQ ID NO: 37235 - DNA, 15 bp, Homo sapiens
ggggaaaaaaagcat

SEQ ID NO: 37236 - DNA, 15 bp, Homo sapiens
gggaaaaaaagcatt

SEQ ID NO: 37237 - DNA, 15 bp, Homo sapiens
ggaaaaaaagcattg

SEQ ID NO: 37238 - DNA, 15 bp, Homo sapiens
gaaaaaaagcattga

SEQ ID NO: 37239 - DNA, 15 bp, Homo sapiens
aaaaaaagcattgaa

SEQ ID NO: 37240 - DNA, 15 bp, Homo sapiens
aaaaaagcattgaat

SEQ ID NO: 37241 - DNA, 15 bp, Homo sapiens
aaaaagcattgaatt

SEQ ID NO: 37242 - DNA, 15 bp, Homo sapiens
aaaagcattgaattt

SEQ ID NO: 37243 - DNA, 15 bp, Homo sapiens
aaagcattgaatttg

SEQ ID NO: 37244 - DNA, 15 bp, Homo sapiens
aagcattgaatttgc

SEQ ID NO: 37245 - DNA, 15 bp, Homo sapiens
agcattgaatttgca

SEQ ID NO: 37246 - DNA, 15 bp, Homo sapiens
gcattgaatttgcac

SEQ ID NO: 37247 - DNA, 15 bp, Homo sapiens
cattgaatttgcaca

SEQ ID NO: 37248 - DNA, 15 bp, Homo sapiens
attgaatttgcacat

SEQ ID NO: 37249 - DNA, 15 bp, Homo sapiens
ttgaatttgcacatt

SEQ ID NO: 37250 - DNA, 15 bp, Homo sapiens
tgaatttgcacattt

SEQ ID NO: 37251 - DNA, 15 bp, Homo sapiens
gaatttgcacatttg

SEQ ID NO: 37252 - DNA, 15 bp, Homo sapiens
aatttgcacatttgg

SEQ ID NO: 37253 - DNA, 15 bp, Homo sapiens
atttgcacatttggt

SEQ ID NO: 37254 - DNA, 15 bp, Homo sapiens
tttgcacatttggtg

SEQ ID NO: 37255 - DNA, 15 bp, Homo sapiens
ttgcacatttggtgg

SEQ ID NO: 37256 - DNA, 15 bp, Homo sapiens
tgcacatttggtggg

SEQ ID NO: 37257 - DNA, 15 bp, Homo sapiens
gcacatttggtggga

SEQ ID NO: 37258 - DNA, 15 bp, Homo sapiens
cacatttggtgggaa

SEQ ID NO: 37259 - DNA, 15 bp, Homo sapiens
acatttggtgggaag

SEQ ID NO: 37260 - DNA, 15 bp, Homo sapiens
catttggtgggaagg

SEQ ID NO: 37261 - DNA, 15 bp, Homo sapiens
atttggtgggaagga

SEQ ID NO: 37262 - DNA, 15 bp, Homo sapiens
tttggtgggaaggag

SEQ ID NO: 37263 - DNA, 15 bp, Homo sapiens
ttggtgggaaggaga

SEQ ID NO: 37264 - DNA, 15 bp, Homo sapiens
tggtgggaaggagac

SEQ ID NO: 37265 - DNA, 15 bp, Homo sapiens
ggtgggaaggagact

SEQ ID NO: 37266 - DNA, 15 bp, Homo sapiens
gtgggaaggagactg

SEQ ID NO: 37267 - DNA, 15 bp, Homo sapiens
tgggaaggagactgt

SEQ ID NO: 37268 - DNA, 15 bp, Homo sapiens
gggaaggagactgtg

SEQ ID NO: 37269 - DNA, 15 bp, Homo sapiens
ggaaggagactgtgt

SEQ ID NO: 37270 - DNA, 15 bp, Homo sapiens
gaaggagactgtgtg

SEQ ID NO: 37271 - DNA, 15 bp, Homo sapiens
aaggagactgtgtgt

SEQ ID NO: 37272 - DNA, 15 bp, Homo sapiens
aggagactgtgtgtg

SEQ ID NO: 37273 - DNA, 15 bp, Homo sapiens
ggagactgtgtgtgt

SEQ ID NO: 37274 - DNA, 15 bp, Homo sapiens
gagactgtgtgtgtg

SEQ ID NO: 37275 - DNA, 15 bp, Homo sapiens
agactgtgtgtgtgt

SEQ ID NO: 37276 - DNA, 15 bp, Homo sapiens
gactgtgtgtgtgta

SEQ ID NO: 37277 - DNA, 15 bp, Homo sapiens
actgtgtgtgtgtac

SEQ ID NO: 37278 - DNA, 15 bp, Homo sapiens
ctgtgtgtgtgtaca

SEQ ID NO: 37279 - DNA, 15 bp, Homo sapiens
tgtgtgtgtgtacac

SEQ ID NO: 37280 - DNA, 15 bp, Homo sapiens
gtgtgtgtgtacaca

SEQ ID NO: 37281 - DNA, 15 bp, Homo sapiens
tgtgtgtgtacacac

SEQ ID NO: 37282 - DNA, 15 bp, Homo sapiens
gtgtgtgtacacaca

SEQ ID NO: 37283 - DNA, 15 bp, Homo sapiens
tgtgtgtacacacat

SEQ ID NO: 37284 - DNA, 15 bp, Homo sapiens
gtgtgtacacacatg

SEQ ID NO: 37285 - DNA, 15 bp, Homo sapiens
tgtgtacacacatgg

SEQ ID NO: 37286 - DNA, 15 bp, Homo sapiens
gtgtacacacatgga

SEQ ID NO: 37287 - DNA, 15 bp, Homo sapiens
tgtacacacatggag

SEQ ID NO: 37288 - DNA, 15 bp, Homo sapiens
gtacacacatggagg

SEQ ID NO: 37289 - DNA, 15 bp, Homo sapiens
tacacacatggaggg

SEQ ID NO: 37290 - DNA, 15 bp, Homo sapiens
acacacatggagggt

SEQ ID NO: 37291 - DNA, 15 bp, Homo sapiens
cacacatggagggtg

SEQ ID NO: 37292 - DNA, 15 bp, Homo sapiens
acacatggagggtga

SEQ ID NO: 37293 - DNA, 15 bp, Homo sapiens
cacatggagggtgag

SEQ ID NO: 37294 - DNA, 15 bp, Homo sapiens
acatggagggtgaga

SEQ ID NO: 37295 - DNA, 15 bp, Homo sapiens
catggagggtgagaa

SEQ ID NO: 37296 - DNA, 15 bp, Homo sapiens
atggagggtgagaat

SEQ ID NO: 37297 - DNA, 15 bp, Homo sapiens
tggagggtgagaatg

SEQ ID NO: 37298 - DNA, 15 bp, Homo sapiens
ggagggtgagaatgt

SEQ ID NO: 37299 - DNA, 15 bp, Homo sapiens
gagggtgagaatgta

SEQ ID NO: 37300 - DNA, 15 bp, Homo sapiens
agggtgagaatgtaa

SEQ ID NO: 37301 - DNA, 15 bp, Homo sapiens
gggtgagaatgtaaa

SEQ ID NO: 37302 - DNA, 15 bp, Homo sapiens
ggtgagaatgtaaaa

SEQ ID NO: 37303 - DNA, 15 bp, Homo sapiens
gtgagaatgtaaaat

SEQ ID NO: 37304 - DNA, 15 bp, Homo sapiens
tgagaatgtaaaatg

SEQ ID NO: 37305 - DNA, 15 bp, Homo sapiens
gagaatgtaaaatgt

SEQ ID NO: 37306 - DNA, 15 bp, Homo sapiens
agaatgtaaaatgta

SEQ ID NO: 37307 - DNA, 15 bp, Homo sapiens
gaatgtaaaatgtaa

SEQ ID NO: 37308 - DNA, 15 bp, Homo sapiens
aatgtaaaatgtaag

SEQ ID NO: 37309 - DNA, 15 bp, Homo sapiens
atgtaaaatgtaaga

SEQ ID NO: 37310 - DNA, 15 bp, Homo sapiens
tgtaaaatgtaagaa

SEQ ID NO: 37311 - DNA, 15 bp, Homo sapiens
gtaaaatgtaagaac

SEQ ID NO: 37312 - DNA, 15 bp, Homo sapiens
taaaatgtaagaaca

SEQ ID NO: 37313 - DNA, 15 bp, Homo sapiens
aaaatgtaagaacac

SEQ ID NO: 37314 - DNA, 15 bp, Homo sapiens
aaatgtaagaacact

SEQ ID NO: 37315 - DNA, 15 bp, Homo sapiens
aatgtaagaacacta

SEQ ID NO: 37316 - DNA, 15 bp, Homo sapiens
atgtaagaacactaa

SEQ ID NO: 37317 - DNA, 15 bp, Homo sapiens
tgtaagaacactaaa

SEQ ID NO: 37318 - DNA, 15 bp, Homo sapiens
gtaagaacactaaat

SEQ ID NO: 37319 - DNA, 15 bp, Homo sapiens
taagaacactaaatt

SEQ ID NO: 37320 - DNA, 15 bp, Homo sapiens
aagaacactaaattt

SEQ ID NO: 37321 - DNA, 15 bp, Homo sapiens
agaacactaaatttt

SEQ ID NO: 37322 - DNA, 15 bp, Homo sapiens
gaacactaaatttta

SEQ ID NO: 37323 - DNA, 15 bp, Homo sapiens
aacactaaattttac

SEQ ID NO: 37324 - DNA, 15 bp, Homo sapiens
acactaaattttaca

SEQ ID NO: 37325 - DNA, 15 bp, Homo sapiens
cactaaattttacag

SEQ ID NO: 37326 - DNA, 15 bp, Homo sapiens
actaaattttacagt

SEQ ID NO: 37327 - DNA, 15 bp, Homo sapiens
ctaaattttacagta

SEQ ID NO: 37328 - DNA, 15 bp, Homo sapiens
taaattttacagtag

SEQ ID NO: 37329 - DNA, 15 bp, Homo sapiens
aaattttacagtaga

SEQ ID NO: 37330 - DNA, 15 bp, Homo sapiens
aattttacagtagat

SEQ ID NO: 37331 - DNA, 15 bp, Homo sapiens
attttacagtagata

SEQ ID NO: 37332 - DNA, 15 bp, Homo sapiens
ttttacagtagatag

SEQ ID NO: 37333 - DNA, 15 bp, Homo sapiens
tttacagtagatagg

SEQ ID NO: 37334 - DNA, 15 bp, Homo sapiens
ttacagtagatagga

SEQ ID NO: 37335 - DNA, 15 bp, Homo sapiens
tacagtagataggaa

SEQ ID NO: 37336 - DNA, 15 bp, Homo sapiens
acagtagataggaaa

SEQ ID NO: 37337 - DNA, 15 bp, Homo sapiens
cagtagataggaaaa

SEQ ID NO: 37338 - DNA, 15 bp, Homo sapiens
agtagataggaaaaa

SEQ ID NO: 37339 - DNA, 15 bp, Homo sapiens
gtagataggaaaaac

SEQ ID NO: 37340 - DNA, 15 bp, Homo sapiens
tagataggaaaaact

SEQ ID NO: 37341 - DNA, 15 bp, Homo sapiens
agataggaaaaacta

SEQ ID NO: 37342 - DNA, 15 bp, Homo sapiens
gataggaaaaactac

SEQ ID NO: 37343 - DNA, 15 bp, Homo sapiens
ataggaaaaactact

SEQ ID NO: 37344 - DNA, 15 bp, Homo sapiens
taggaaaaactactg

SEQ ID NO: 37345 - DNA, 15 bp, Homo sapiens
aggaaaaactactga

SEQ ID NO: 37346 - DNA, 15 bp, Homo sapiens
ggaaaaactactgag

SEQ ID NO: 37347 - DNA, 15 bp, Homo sapiens
gaaaaactactgaga

SEQ ID NO: 37348 - DNA, 15 bp, Homo sapiens
aaaaactactgagat

SEQ ID NO: 37349 - DNA, 15 bp, Homo sapiens
aaaactactgagatt

SEQ ID NO: 37350 - DNA, 15 bp, Homo sapiens
aaactactgagatta

SEQ ID NO: 37351 - DNA, 15 bp, Homo sapiens
aactactgagattac

SEQ ID NO: 37352 - DNA, 15 bp, Homo sapiens
actactgagattaca

SEQ ID NO: 37353 - DNA, 15 bp, Homo sapiens
ctactgagattacag

SEQ ID NO: 37354 - DNA, 15 bp, Homo sapiens
tactgagattacaga

SEQ ID NO: 37355 - DNA, 15 bp, Homo sapiens
actgagattacagaa

SEQ ID NO: 37356 - DNA, 15 bp, Homo sapiens
ctgagattacagaag

SEQ ID NO: 37357 - DNA, 15 bp, Homo sapiens
tgagattacagaagc

SEQ ID NO: 37358 - DNA, 15 bp, Homo sapiens
gagattacagaagca

SEQ ID NO: 37359 - DNA, 15 bp, Homo sapiens
agattacagaagcat

SEQ ID NO: 37360 - DNA, 15 bp, Homo sapiens
gattacagaagcata

SEQ ID NO: 37361 - DNA, 15 bp, Homo sapiens
attacagaagcataa

SEQ ID NO: 37362 - DNA, 15 bp, Homo sapiens
ttacagaagcataaa

SEQ ID NO: 37363 - DNA, 15 bp, Homo sapiens
tacagaagcataaaa

SEQ ID NO: 37364 - DNA, 15 bp, Homo sapiens
acagaagcataaaat

SEQ ID NO: 37365 - DNA, 15 bp, Homo sapiens
cagaagcataaaata

SEQ ID NO: 37366 - DNA, 15 bp, Homo sapiens
agaagcataaaataa

SEQ ID NO: 37367 - DNA, 15 bp, Homo sapiens
gaagcataaaataag

SEQ ID NO: 37368 - DNA, 15 bp, Homo sapiens
aagcataaaataaga

SEQ ID NO: 37369 - DNA, 15 bp, Homo sapiens
agcataaaataagac

SEQ ID NO: 37370 - DNA, 15 bp, Homo sapiens
gcataaaataagacc

SEQ ID NO: 37371 - DNA, 15 bp, Homo sapiens
cataaaataagacct

SEQ ID NO: 37372 - DNA, 15 bp, Homo sapiens
ataaaataagacctt

SEQ ID NO: 37373 - DNA, 15 bp, Homo sapiens
taaaataagaccttg

SEQ ID NO: 37374 - DNA, 15 bp, Homo sapiens
aaaataagaccttgg

SEQ ID NO: 37375 - DNA, 15 bp, Homo sapiens
aaataagaccttgga

SEQ ID NO: 37376 - DNA, 15 bp, Homo sapiens
aataagaccttggag

SEQ ID NO: 37377 - DNA, 15 bp, Homo sapiens
ataagaccttggaga

SEQ ID NO: 37378 - DNA, 15 bp, Homo sapiens
taagaccttggagaa

SEQ ID NO: 37379 - DNA, 15 bp, Homo sapiens
aagaccttggagaaa

SEQ ID NO: 37380 - DNA, 15 bp, Homo sapiens
agaccttggagaaac

SEQ ID NO: 37381 - DNA, 15 bp, Homo sapiens
gaccttggagaaaca

SEQ ID NO: 37382 - DNA, 15 bp, Homo sapiens
accttggagaaacac

SEQ ID NO: 37383 - DNA, 15 bp, Homo sapiens
ccttggagaaacaca

SEQ ID NO: 37384 - DNA, 15 bp, Homo sapiens
cttggagaaacacag

SEQ ID NO: 37385 - DNA, 15 bp, Homo sapiens
ttggagaaacacagg

SEQ ID NO: 37386 - DNA, 15 bp, Homo sapiens
tggagaaacacaggc

SEQ ID NO: 37387 - DNA, 15 bp, Homo sapiens
ggagaaacacaggca

SEQ ID NO: 37388 - DNA, 15 bp, Homo sapiens
gagaaacacaggcaa

SEQ ID NO: 37389 - DNA, 15 bp, Homo sapiens
agaaacacaggcaaa

SEQ ID NO: 37390 - DNA, 15 bp, Homo sapiens
gaaacacaggcaaat

SEQ ID NO: 37391 - DNA, 15 bp, Homo sapiens
aaacacaggcaaatt

SEQ ID NO: 37392 - DNA, 15 bp, Homo sapiens
aacacaggcaaattg

SEQ ID NO: 37393 - DNA, 15 bp, Homo sapiens
acacaggcaaattga

SEQ ID NO: 37394 - DNA, 15 bp, Homo sapiens
cacaggcaaattgaa

SEQ ID NO: 37395 - DNA, 15 bp, Homo sapiens
acaggcaaattgaac

SEQ ID NO: 37396 - DNA, 15 bp, Homo sapiens
caggcaaattgaaca

SEQ ID NO: 37397 - DNA, 15 bp, Homo sapiens
aggcaaattgaacac

SEQ ID NO: 37398 - DNA, 15 bp, Homo sapiens
ggcaaattgaacaca

SEQ ID NO: 37399 - DNA, 15 bp, Homo sapiens
gcaaattgaacacaa

SEQ ID NO: 37400 - DNA, 15 bp, Homo sapiens
caaattgaacacaaa

SEQ ID NO: 37401 - DNA, 15 bp, Homo sapiens
aaattgaacacaaaa

SEQ ID NO: 37402 - DNA, 15 bp, Homo sapiens
aattgaacacaaaat

SEQ ID NO: 37403 - DNA, 15 bp, Homo sapiens
attgaacacaaaata

SEQ ID NO: 37404 - DNA, 15 bp, Homo sapiens
ttgaacacaaaatac

SEQ ID NO: 37405 - DNA, 15 bp, Homo sapiens
tgaacacaaaatacc

SEQ ID NO: 37406 - DNA, 15 bp, Homo sapiens
gaacacaaaatacca

SEQ ID NO: 37407 - DNA, 15 bp, Homo sapiens
aacacaaaataccaa

SEQ ID NO: 37408 - DNA, 15 bp, Homo sapiens
acacaaaataccaaa

SEQ ID NO: 37409 - DNA, 15 bp, Homo sapiens
cacaaaataccaaat

SEQ ID NO: 37410 - DNA, 15 bp, Homo sapiens
acaaaataccaaatg

SEQ ID NO: 37411 - DNA, 15 bp, Homo sapiens
caaaataccaaatgt

SEQ ID NO: 37412 - DNA, 15 bp, Homo sapiens
aaaataccaaatgtc

SEQ ID NO: 37413 - DNA, 15 bp, Homo sapiens
aaataccaaatgtca

SEQ ID NO: 37414 - DNA, 15 bp, Homo sapiens
aataccaaatgtcat

SEQ ID NO: 37415 - DNA, 15 bp, Homo sapiens
ataccaaatgtcatc

SEQ ID NO: 37416 - DNA, 15 bp, Homo sapiens
taccaaatgtcatcg

SEQ ID NO: 37417 - DNA, 15 bp, Homo sapiens
accaaatgtcatcgg

SEQ ID NO: 37418 - DNA, 15 bp, Homo sapiens
ccaaatgtcatcgga

SEQ ID NO: 37419 - DNA, 15 bp, Homo sapiens
caaatgtcatcggaa

SEQ ID NO: 37420 - DNA, 15 bp, Homo sapiens
aaatgtcatcggaaa

SEQ ID NO: 37421 - DNA, 15 bp, Homo sapiens
aatgtcatcggaaag

SEQ ID NO: 37422 - DNA, 15 bp, Homo sapiens
atgtcatcggaaagg

SEQ ID NO: 37423 - DNA, 15 bp, Homo sapiens
tgtcatcggaaagga

SEQ ID NO: 37424 - DNA, 15 bp, Homo sapiens
gtcatcggaaaggac

SEQ ID NO: 37425 - DNA, 15 bp, Homo sapiens
tcatcggaaaggact

SEQ ID NO: 37426 - DNA, 15 bp, Homo sapiens
catcggaaaggactg

SEQ ID NO: 37427 - DNA, 15 bp, Homo sapiens
atcggaaaggactgt

SEQ ID NO: 37428 - DNA, 15 bp, Homo sapiens
tcggaaaggactgtg

SEQ ID NO: 37429 - DNA, 15 bp, Homo sapiens
cggaaaggactgtga

SEQ ID NO: 37430 - DNA, 15 bp, Homo sapiens
ggaaaggactgtgac

SEQ ID NO: 37431 - DNA, 15 bp, Homo sapiens
gaaaggactgtgact

SEQ ID NO: 37432 - DNA, 15 bp, Homo sapiens
aaaggactgtgactc

SEQ ID NO: 37433 - DNA, 15 bp, Homo sapiens
aaggactgtgactca

SEQ ID NO: 37434 - DNA, 15 bp, Homo sapiens
aggactgtgactcaa

SEQ ID NO: 37435 - DNA, 15 bp, Homo sapiens
ggactgtgactcaaa

SEQ ID NO: 37436 - DNA, 15 bp, Homo sapiens
gactgtgactcaaat

SEQ ID NO: 37437 - DNA, 15 bp, Homo sapiens
actgtgactcaaatg

SEQ ID NO: 37438 - DNA, 15 bp, Homo sapiens
ctgtgactcaaatgt

SEQ ID NO: 37439 - DNA, 15 bp, Homo sapiens
tgtgactcaaatgtg

SEQ ID NO: 37440 - DNA, 15 bp, Homo sapiens
gtgactcaaatgtga

SEQ ID NO: 37441 - DNA, 15 bp, Homo sapiens
tgactcaaatgtgac

SEQ ID NO: 37442 - DNA, 15 bp, Homo sapiens
gactcaaatgtgacc

SEQ ID NO: 37443 - DNA, 15 bp, Homo sapiens
actcaaatgtgaccg

SEQ ID NO: 37444 - DNA, 15 bp, Homo sapiens
ctcaaatgtgaccga

SEQ ID NO: 37445 - DNA, 15 bp, Homo sapiens
tcaaatgtgaccgat

SEQ ID NO: 37446 - DNA, 15 bp, Homo sapiens
caaatgtgaccgata

SEQ ID NO: 37447 - DNA, 15 bp, Homo sapiens
aaatgtgaccgatac

SEQ ID NO: 37448 - DNA, 15 bp, Homo sapiens
aatgtgaccgataca

SEQ ID NO: 37449 - DNA, 15 bp, Homo sapiens
atgtgaccgatacat

SEQ ID NO: 37450 - DNA, 15 bp, Homo sapiens
tgtgaccgatacatg

SEQ ID NO: 37451 - DNA, 15 bp, Homo sapiens
gtgaccgatacatga

SEQ ID NO: 37452 - DNA, 15 bp, Homo sapiens
tgaccgatacatgaa

SEQ ID NO: 37453 - DNA, 15 bp, Homo sapiens
gaccgatacatgaac

SEQ ID NO: 37454 - DNA, 15 bp, Homo sapiens
accgatacatgaaca

SEQ ID NO: 37455 - DNA, 15 bp, Homo sapiens
ccgatacatgaacat

SEQ ID NO: 37456 - DNA, 15 bp, Homo sapiens
cgatacatgaacatt

SEQ ID NO: 37457 - DNA, 15 bp, Homo sapiens
gatacatgaacattg

SEQ ID NO: 37458 - DNA, 15 bp, Homo sapiens
atacatgaacattgt

SEQ ID NO: 37459 - DNA, 15 bp, Homo sapiens
tacatgaacattgta

SEQ ID NO: 37460 - DNA, 15 bp, Homo sapiens
acatgaacattgtac

SEQ ID NO: 37461 - DNA, 15 bp, Homo sapiens
catgaacattgtact

SEQ ID NO: 37462 - DNA, 15 bp, Homo sapiens
atgaacattgtactg

SEQ ID NO: 37463 - DNA, 15 bp, Homo sapiens
tgaacattgtactgc

SEQ ID NO: 37464 - DNA, 15 bp, Homo sapiens
gaacattgtactgct

SEQ ID NO: 37465 - DNA, 15 bp, Homo sapiens
aacattgtactgctt

SEQ ID NO: 37466 - DNA, 15 bp, Homo sapiens
acattgtactgcttc

SEQ ID NO: 37467 - DNA, 15 bp, Homo sapiens
cattgtactgcttca

SEQ ID NO: 37468 - DNA, 15 bp, Homo sapiens
attgtactgcttcag

SEQ ID NO: 37469 - DNA, 15 bp, Homo sapiens
ttgtactgcttcaga

SEQ ID NO: 37470 - DNA, 15 bp, Homo sapiens
tgtactgcttcagaa

SEQ ID NO: 37471 - DNA, 15 bp, Homo sapiens
gtactgcttcagaaa

SEQ ID NO: 37472 - DNA, 15 bp, Homo sapiens
tactgcttcagaaaa

SEQ ID NO: 37473 - DNA, 15 bp, Homo sapiens
actgcttcagaaaag

SEQ ID NO: 37474 - DNA, 15 bp, Homo sapiens
ctgcttcagaaaagc

SEQ ID NO: 37475 - DNA, 15 bp, Homo sapiens
tgcttcagaaaagct

SEQ ID NO: 37476 - DNA, 15 bp, Homo sapiens
gcttcagaaaagcta

SEQ ID NO: 37477 - DNA, 15 bp, Homo sapiens
cttcagaaaagctag

SEQ ID NO: 37478 - DNA, 15 bp, Homo sapiens
ttcagaaaagctagc

SEQ ID NO: 37479 - DNA, 15 bp, Homo sapiens
tcagaaaagctagca

SEQ ID NO: 37480 - DNA, 15 bp, Homo sapiens
cagaaaagctagcaa

SEQ ID NO: 37481 - DNA, 15 bp, Homo sapiens
agaaaagctagcaat

SEQ ID NO: 37482 - DNA, 15 bp, Homo sapiens
gaaaagctagcaata

SEQ ID NO: 37483 - DNA, 15 bp, Homo sapiens
aaaagctagcaatat

SEQ ID NO: 37484 - DNA, 15 bp, Homo sapiens
aaagctagcaatatt

SEQ ID NO: 37485 - DNA, 15 bp, Homo sapiens
aagctagcaatattg

SEQ ID NO: 37486 - DNA, 15 bp, Homo sapiens
agctagcaatattgt

SEQ ID NO: 37487 - DNA, 15 bp, Homo sapiens
gctagcaatattgtc

SEQ ID NO: 37488 - DNA, 15 bp, Homo sapiens
ctagcaatattgtca

SEQ ID NO: 37489 - DNA, 15 bp, Homo sapiens
tagcaatattgtcag

SEQ ID NO: 37490 - DNA, 15 bp, Homo sapiens
agcaatattgtcaga

SEQ ID NO: 37491 - DNA, 15 bp, Homo sapiens
gcaatattgtcagaa

SEQ ID NO: 37492 - DNA, 15 bp, Homo sapiens
caatattgtcagaaa

SEQ ID NO: 37493 - DNA, 15 bp, Homo sapiens
aatattgtcagaaac

SEQ ID NO: 37494 - DNA, 15 bp, Homo sapiens
atattgtcagaaact

SEQ ID NO: 37495 - DNA, 15 bp, Homo sapiens
tattgtcagaaacta

SEQ ID NO: 37496 - DNA, 15 bp, Homo sapiens
attgtcagaaactag

SEQ ID NO: 37497 - DNA, 15 bp, Homo sapiens
ttgtcagaaactagt

SEQ ID NO: 37498 - DNA, 15 bp, Homo sapiens
tgtcagaaactagtc

SEQ ID NO: 37499 - DNA, 15 bp, Homo sapiens
gtcagaaactagtca

SEQ ID NO: 37500 - DNA, 15 bp, Homo sapiens
tcagaaactagtcaa

SEQ ID NO: 37501 - DNA, 15 bp, Homo sapiens
cagaaactagtcaat

SEQ ID NO: 37502 - DNA, 15 bp, Homo sapiens
agaaactagtcaata

SEQ ID NO: 37503 - DNA, 15 bp, Homo sapiens
gaaactagtcaataa

SEQ ID NO: 37504 - DNA, 15 bp, Homo sapiens
aaactagtcaataaa

SEQ ID NO: 37505 - DNA, 15 bp, Homo sapiens
aactagtcaataaaa

SEQ ID NO: 37506 - DNA, 15 bp, Homo sapiens
actagtcaataaaaa

SEQ ID NO: 37507 - DNA, 15 bp, Homo sapiens
ctagtcaataaaaat

SEQ ID NO: 37508 - DNA, 15 bp, Homo sapiens
tagtcaataaaaatt

SEQ ID NO: 37509 - DNA, 15 bp, Homo sapiens
agtcaataaaaattt

SEQ ID NO: 37510 - DNA, 15 bp, Homo sapiens
gtcaataaaaattta

SEQ ID NO: 37511 - DNA, 15 bp, Homo sapiens
tcaataaaaatttac

SEQ ID NO: 37512 - DNA, 15 bp, Homo sapiens
caataaaaatttacc

SEQ ID NO: 37513 - DNA, 15 bp, Homo sapiens
aataaaaatttacct

SEQ ID NO: 37514 - DNA, 15 bp, Homo sapiens
ataaaaatttaccta

SEQ ID NO: 37515 - DNA, 15 bp, Homo sapiens
taaaaatttacctaa

SEQ ID NO: 37516 - DNA, 15 bp, Homo sapiens
aaaaatttacctaat

SEQ ID NO: 37517 - DNA, 15 bp, Homo sapiens
aaaatttacctaatt

SEQ ID NO: 37518 - DNA, 15 bp, Homo sapiens
aaatttacctaatta

SEQ ID NO: 37519 - DNA, 15 bp, Homo sapiens
aatttacctaattat

SEQ ID NO: 37520 - DNA, 15 bp, Homo sapiens
atttacctaattatt

SEQ ID NO: 37521 - DNA, 15 bp, Homo sapiens
tttacctaattatta

SEQ ID NO: 37522 - DNA, 15 bp, Homo sapiens
ttacctaattattat

SEQ ID NO: 37523 - DNA, 15 bp, Homo sapiens
tacctaattattatt

SEQ ID NO: 37524 - DNA, 15 bp, Homo sapiens
acctaattattatta

SEQ ID NO: 37525 - DNA, 15 bp, Homo sapiens
cctaattattattag

SEQ ID NO: 37526 - DNA, 15 bp, Homo sapiens
ctaattattattagt

SEQ ID NO: 37527 - DNA, 15 bp, Homo sapiens
taattattattagta

SEQ ID NO: 37528 - DNA, 15 bp, Homo sapiens
aattattattagtaa

SEQ ID NO: 37529 - DNA, 15 bp, Homo sapiens
attattattagtaac

SEQ ID NO: 37530 - DNA, 15 bp, Homo sapiens
ttattattagtaacc

SEQ ID NO: 37531 - DNA, 15 bp, Homo sapiens
tattattagtaacca

SEQ ID NO: 37532 - DNA, 15 bp, Homo sapiens
attattagtaaccaa

SEQ ID NO: 37533 - DNA, 15 bp, Homo sapiens
ttattagtaaccaaa

SEQ ID NO: 37534 - DNA, 15 bp, Homo sapiens
tattagtaaccaaag

SEQ ID NO: 37535 - DNA, 15 bp, Homo sapiens
attagtaaccaaagc

SEQ ID NO: 37536 - DNA, 15 bp, Homo sapiens
ttagtaaccaaagca

SEQ ID NO: 37537 - DNA, 15 bp, Homo sapiens
tagtaaccaaagcac

SEQ ID NO: 37538 - DNA, 15 bp, Homo sapiens
agtaaccaaagcact

SEQ ID NO: 37539 - DNA, 15 bp, Homo sapiens
gtaaccaaagcactg

SEQ ID NO: 37540 - DNA, 15 bp, Homo sapiens
taaccaaagcactga

SEQ ID NO: 37541 - DNA, 15 bp, Homo sapiens
aaccaaagcactgaa

SEQ ID NO: 37542 - DNA, 15 bp, Homo sapiens
accaaagcactgaac

SEQ ID NO: 37543 - DNA, 15 bp, Homo sapiens
ccaaagcactgaaca

SEQ ID NO: 37544 - DNA, 15 bp, Homo sapiens
caaagcactgaacag

SEQ ID NO: 37545 - DNA, 15 bp, Homo sapiens
aaagcactgaacagt

SEQ ID NO: 37546 - DNA, 15 bp, Homo sapiens
aagcactgaacagta

SEQ ID NO: 37547 - DNA, 15 bp, Homo sapiens
agcactgaacagtac

SEQ ID NO: 37548 - DNA, 15 bp, Homo sapiens
gcactgaacagtaca

SEQ ID NO: 37549 - DNA, 15 bp, Homo sapiens
cactgaacagtacaa

SEQ ID NO: 37550 - DNA, 15 bp, Homo sapiens
actgaacagtacaag

SEQ ID NO: 37551 - DNA, 15 bp, Homo sapiens
ctgaacagtacaagg

SEQ ID NO: 37552 - DNA, 15 bp, Homo sapiens
tgaacagtacaaggc

SEQ ID NO: 37553 - DNA, 15 bp, Homo sapiens
gaacagtacaaggca

SEQ ID NO: 37554 - DNA, 15 bp, Homo sapiens
aacagtacaaggcac

SEQ ID NO: 37555 - DNA, 15 bp, Homo sapiens
acagtacaaggcact

SEQ ID NO: 37556 - DNA, 15 bp, Homo sapiens
cagtacaaggcacta

SEQ ID NO: 37557 - DNA, 15 bp, Homo sapiens
agtacaaggcactat

SEQ ID NO: 37558 - DNA, 15 bp, Homo sapiens
gtacaaggcactata

SEQ ID NO: 37559 - DNA, 15 bp, Homo sapiens
tacaaggcactataa

SEQ ID NO: 37560 - DNA, 15 bp, Homo sapiens
acaaggcactataag

SEQ ID NO: 37561 - DNA, 15 bp, Homo sapiens
caaggcactataagc

SEQ ID NO: 37562 - DNA, 15 bp, Homo sapiens
aaggcactataagct

SEQ ID NO: 37563 - DNA, 15 bp, Homo sapiens
aggcactataagcta

SEQ ID NO: 37564 - DNA, 15 bp, Homo sapiens
ggcactataagctag

SEQ ID NO: 37565 - DNA, 15 bp, Homo sapiens
gcactataagctagt

SEQ ID NO: 37566 - DNA, 15 bp, Homo sapiens
cactataagctagta

SEQ ID NO: 37567 - DNA, 15 bp, Homo sapiens
actataagctagtaa

SEQ ID NO: 37568 - DNA, 15 bp, Homo sapiens
ctataagctagtaaa

SEQ ID NO: 37569 - DNA, 15 bp, Homo sapiens
tataagctagtaaaa

SEQ ID NO: 37570 - DNA, 15 bp, Homo sapiens
ataagctagtaaaat

SEQ ID NO: 37571 - DNA, 15 bp, Homo sapiens
taagctagtaaaatc

SEQ ID NO: 37572 - DNA, 15 bp, Homo sapiens
aagctagtaaaatca

SEQ ID NO: 37573 - DNA, 15 bp, Homo sapiens
agctagtaaaatcac

SEQ ID NO: 37574 - DNA, 15 bp, Homo sapiens
gctagtaaaatcact

SEQ ID NO: 37575 - DNA, 15 bp, Homo sapiens
ctagtaaaatcactg

SEQ ID NO: 37576 - DNA, 15 bp, Homo sapiens
tagtaaaatcactgg

SEQ ID NO: 37577 - DNA, 15 bp, Homo sapiens
agtaaaatcactggt

SEQ ID NO: 37578 - DNA, 15 bp, Homo sapiens
gtaaaatcactggtc

SEQ ID NO: 37579 - DNA, 15 bp, Homo sapiens
taaaatcactggtca

SEQ ID NO: 37580 - DNA, 15 bp, Homo sapiens
aaaatcactggtcat

SEQ ID NO: 37581 - DNA, 15 bp, Homo sapiens
aaatcactggtcatt

SEQ ID NO: 37582 - DNA, 15 bp, Homo sapiens
aatcactggtcattc

SEQ ID NO: 37583 - DNA, 15 bp, Homo sapiens
atcactggtcattcc

SEQ ID NO: 37584 - DNA, 15 bp, Homo sapiens
tcactggtcattcct

SEQ ID NO: 37585 - DNA, 15 bp, Homo sapiens
cactggtcattcctc

SEQ ID NO: 37586 - DNA, 15 bp, Homo sapiens
actggtcattcctcg

SEQ ID NO: 37587 - DNA, 15 bp, Homo sapiens
ctggtcattcctcga

SEQ ID NO: 37588 - DNA, 15 bp, Homo sapiens
tggtcattcctcgaa

SEQ ID NO: 37589 - DNA, 15 bp, Homo sapiens
ggtcattcctcgaaa

SEQ ID NO: 37590 - DNA, 15 bp, Homo sapiens
gtcattcctcgaaag

SEQ ID NO: 37591 - DNA, 15 bp, Homo sapiens
tcattcctcgaaaga

SEQ ID NO: 37592 - DNA, 15 bp, Homo sapiens
cattcctcgaaagaa

SEQ ID NO: 37593 - DNA, 15 bp, Homo sapiens
attcctcgaaagaaa

SEQ ID NO: 37594 - DNA, 15 bp, Homo sapiens
ttcctcgaaagaaac

SEQ ID NO: 37595 - DNA, 15 bp, Homo sapiens
tcctcgaaagaaaca

SEQ ID NO: 37596 - DNA, 15 bp, Homo sapiens
cctcgaaagaaacat

SEQ ID NO: 37597 - DNA, 15 bp, Homo sapiens
ctcgaaagaaacatg

SEQ ID NO: 37598 - DNA, 15 bp, Homo sapiens
tcgaaagaaacatga

SEQ ID NO: 37599 - DNA, 15 bp, Homo sapiens
cgaaagaaacatgat

SEQ ID NO: 37600 - DNA, 15 bp, Homo sapiens
gaaagaaacatgata

SEQ ID NO: 37601 - DNA, 15 bp, Homo sapiens
aaagaaacatgatac

SEQ ID NO: 37602 - DNA, 15 bp, Homo sapiens
aagaaacatgataca

SEQ ID NO: 37603 - DNA, 15 bp, Homo sapiens
agaaacatgatacat

SEQ ID NO: 37604 - DNA, 15 bp, Homo sapiens
gaaacatgatacata

SEQ ID NO: 37605 - DNA, 15 bp, Homo sapiens
aaacatgatacatag

SEQ ID NO: 37606 - DNA, 15 bp, Homo sapiens
aacatgatacatagg

SEQ ID NO: 37607 - DNA, 15 bp, Homo sapiens
acatgatacataggt

SEQ ID NO: 37608 - DNA, 15 bp, Homo sapiens
catgatacataggta

SEQ ID NO: 37609 - DNA, 15 bp, Homo sapiens
atgatacataggtag

SEQ ID NO: 37610 - DNA, 15 bp, Homo sapiens
tgatacataggtaga

SEQ ID NO: 37611 - DNA, 15 bp, Homo sapiens
gatacataggtagat

SEQ ID NO: 37612 - DNA, 15 bp, Homo sapiens
atacataggtagata

SEQ ID NO: 37613 - DNA, 15 bp, Homo sapiens
tacataggtagataa

SEQ ID NO: 37614 - DNA, 15 bp, Homo sapiens
acataggtagataac

SEQ ID NO: 37615 - DNA, 15 bp, Homo sapiens
cataggtagataacc

SEQ ID NO: 37616 - DNA, 15 bp, Homo sapiens
ataggtagataacca

SEQ ID NO: 37617 - DNA, 15 bp, Homo sapiens
taggtagataaccac

SEQ ID NO: 37618 - DNA, 15 bp, Homo sapiens
aggtagataaccact

SEQ ID NO: 37619 - DNA, 15 bp, Homo sapiens
ggtagataaccactc

SEQ ID NO: 37620 - DNA, 15 bp, Homo sapiens
gtagataaccactcg

SEQ ID NO: 37621 - DNA, 15 bp, Homo sapiens
tagataaccactcga

SEQ ID NO: 37622 - DNA, 15 bp, Homo sapiens
agataaccactcgag

SEQ ID NO: 37623 - DNA, 15 bp, Homo sapiens
gataaccactcgaga

SEQ ID NO: 37624 - DNA, 15 bp, Homo sapiens
ataaccactcgagag

SEQ ID NO: 37625 - DNA, 15 bp, Homo sapiens
taaccactcgagagc

SEQ ID NO: 37626 - DNA, 15 bp, Homo sapiens
aaccactcgagagca

SEQ ID NO: 37627 - DNA, 15 bp, Homo sapiens
accactcgagagcag

SEQ ID NO: 37628 - DNA, 15 bp, Homo sapiens
ccactcgagagcaga

SEQ ID NO: 37629 - DNA, 15 bp, Homo sapiens
cactcgagagcagat

SEQ ID NO: 37630 - DNA, 15 bp, Homo sapiens
actcgagagcagatg

SEQ ID NO: 37631 - DNA, 15 bp, Homo sapiens
ctcgagagcagatgc

SEQ ID NO: 37632 - DNA, 15 bp, Homo sapiens
tcgagagcagatgca

SEQ ID NO: 37633 - DNA, 15 bp, Homo sapiens
cgagagcagatgcag

SEQ ID NO: 37634 - DNA, 15 bp, Homo sapiens
gagagcagatgcagt

SEQ ID NO: 37635 - DNA, 15 bp, Homo sapiens
agagcagatgcagtt

SEQ ID NO: 37636 - DNA, 15 bp, Homo sapiens
gagcagatgcagtta

SEQ ID NO: 37637 - DNA, 15 bp, Homo sapiens
agcagatgcagttag

SEQ ID NO: 37638 - DNA, 15 bp, Homo sapiens
gcagatgcagttagt

SEQ ID NO: 37639 - DNA, 15 bp, Homo sapiens
cagatgcagttagtg

SEQ ID NO: 37640 - DNA, 15 bp, Homo sapiens
agatgcagttagtgg

SEQ ID NO: 37641 - DNA, 15 bp, Homo sapiens
gatgcagttagtggc

SEQ ID NO: 37642 - DNA, 15 bp, Homo sapiens
atgcagttagtggca

SEQ ID NO: 37643 - DNA, 15 bp, Homo sapiens
tgcagttagtggcag

SEQ ID NO: 37644 - DNA, 15 bp, Homo sapiens
gcagttagtggcagg

SEQ ID NO: 37645 - DNA, 15 bp, Homo sapiens
cagttagtggcaggg

SEQ ID NO: 37646 - DNA, 15 bp, Homo sapiens
agttagtggcaggga

SEQ ID NO: 37647 - DNA, 15 bp, Homo sapiens
gttagtggcagggac

SEQ ID NO: 37648 - DNA, 15 bp, Homo sapiens
ttagtggcagggaca

SEQ ID NO: 37649 - DNA, 15 bp, Homo sapiens
tagtggcagggacac

SEQ ID NO: 37650 - DNA, 15 bp, Homo sapiens
agtggcagggacaca

SEQ ID NO: 37651 - DNA, 15 bp, Homo sapiens
gtggcagggacacat

SEQ ID NO: 37652 - DNA, 15 bp, Homo sapiens
tggcagggacacatt

SEQ ID NO: 37653 - DNA, 15 bp, Homo sapiens
ggcagggacacattt

SEQ ID NO: 37654 - DNA, 15 bp, Homo sapiens
gcagggacacattta

SEQ ID NO: 37655 - DNA, 15 bp, Homo sapiens
cagggacacatttaa

SEQ ID NO: 37656 - DNA, 15 bp, Homo sapiens
agggacacatttaaa

SEQ ID NO: 37657 - DNA, 15 bp, Homo sapiens
gggacacatttaaaa

SEQ ID NO: 37658 - DNA, 15 bp, Homo sapiens
ggacacatttaaaac

SEQ ID NO: 37659 - DNA, 15 bp, Homo sapiens
gacacatttaaaaca

SEQ ID NO: 37660 - DNA, 15 bp, Homo sapiens
acacatttaaaacaa

SEQ ID NO: 37661 - DNA, 15 bp, Homo sapiens
cacatttaaaacaac

SEQ ID NO: 37662 - DNA, 15 bp, Homo sapiens
acatttaaaacaacc

SEQ ID NO: 37663 - DNA, 15 bp, Homo sapiens
catttaaaacaacca

SEQ ID NO: 37664 - DNA, 15 bp, Homo sapiens
atttaaaacaaccat

SEQ ID NO: 37665 - DNA, 15 bp, Homo sapiens
tttaaaacaaccata

SEQ ID NO: 37666 - DNA, 15 bp, Homo sapiens
ttaaaacaaccataa

SEQ ID NO: 37667 - DNA, 15 bp, Homo sapiens
taaaacaaccataaa

SEQ ID NO: 37668 - DNA, 15 bp, Homo sapiens
aaaacaaccataaaa

SEQ ID NO: 37669 - DNA, 15 bp, Homo sapiens
aaacaaccataaaaa

SEQ ID NO: 37670 - DNA, 15 bp, Homo sapiens
aacaaccataaaaat

SEQ ID NO: 37671 - DNA, 15 bp, Homo sapiens
acaaccataaaaatg

SEQ ID NO: 37672 - DNA, 15 bp, Homo sapiens
caaccataaaaatgc

SEQ ID NO: 37673 - DNA, 15 bp, Homo sapiens
aaccataaaaatgca

SEQ ID NO: 37674 - DNA, 15 bp, Homo sapiens
accataaaaatgcaa

SEQ ID NO: 37675 - DNA, 15 bp, Homo sapiens
ccataaaaatgcaaa

SEQ ID NO: 37676 - DNA, 15 bp, Homo sapiens
cataaaaatgcaaaa

SEQ ID NO: 37677 - DNA, 15 bp, Homo sapiens
ataaaaatgcaaaaa

SEQ ID NO: 37678 - DNA, 15 bp, Homo sapiens
taaaaatgcaaaaaa

SEQ ID NO: 37679 - DNA, 15 bp, Homo sapiens
aaaaatgcaaaaaac

SEQ ID NO: 37680 - DNA, 15 bp, Homo sapiens
aaaatgcaaaaaaca

SEQ ID NO: 37681 - DNA, 15 bp, Homo sapiens
aaatgcaaaaaacaa

SEQ ID NO: 37682 - DNA, 15 bp, Homo sapiens
aatgcaaaaaacaag

SEQ ID NO: 37683 - DNA, 15 bp, Homo sapiens
atgcaaaaaacaagc

SEQ ID NO: 37684 - DNA, 15 bp, Homo sapiens
tgcaaaaaacaagca

SEQ ID NO: 37685 - DNA, 15 bp, Homo sapiens
gcaaaaaacaagcag

SEQ ID NO: 37686 - DNA, 15 bp, Homo sapiens
caaaaaacaagcagt

SEQ ID NO: 37687 - DNA, 15 bp, Homo sapiens
aaaaaacaagcagta

SEQ ID NO: 37688 - DNA, 15 bp, Homo sapiens
aaaaacaagcagtac

SEQ ID NO: 37689 - DNA, 15 bp, Homo sapiens
aaaacaagcagtaca

SEQ ID NO: 37690 - DNA, 15 bp, Homo sapiens
aaacaagcagtacaa

SEQ ID NO: 37691 - DNA, 15 bp, Homo sapiens
aacaagcagtacaaa

SEQ ID NO: 37692 - DNA, 15 bp, Homo sapiens
acaagcagtacaaat

SEQ ID NO: 37693 - DNA, 15 bp, Homo sapiens
caagcagtacaaatg

SEQ ID NO: 37694 - DNA, 15 bp, Homo sapiens
aagcagtacaaatga

SEQ ID NO: 37695 - DNA, 15 bp, Homo sapiens
agcagtacaaatgaa

SEQ ID NO: 37696 - DNA, 15 bp, Homo sapiens
gcagtacaaatgaaa

SEQ ID NO: 37697 - DNA, 15 bp, Homo sapiens
cagtacaaatgaaat

SEQ ID NO: 37698 - DNA, 15 bp, Homo sapiens
agtacaaatgaaata

SEQ ID NO: 37699 - DNA, 15 bp, Homo sapiens
gtacaaatgaaataa

SEQ ID NO: 37700 - DNA, 15 bp, Homo sapiens
tacaaatgaaataaa

SEQ ID NO: 37701 - DNA, 15 bp, Homo sapiens
acaaatgaaataaac

SEQ ID NO: 37702 - DNA, 15 bp, Homo sapiens
caaatgaaataaact

SEQ ID NO: 37703 - DNA, 15 bp, Homo sapiens
aaatgaaataaactg

SEQ ID NO: 37704 - DNA, 15 bp, Homo sapiens
aatgaaataaactga

SEQ ID NO: 37705 - DNA, 15 bp, Homo sapiens
atgaaataaactgat

SEQ ID NO: 37706 - DNA, 15 bp, Homo sapiens
tgaaataaactgatt

SEQ ID NO: 37707 - DNA, 15 bp, Homo sapiens
gaaataaactgattt

SEQ ID NO: 37708 - DNA, 15 bp, Homo sapiens
aaataaactgatttt

SEQ ID NO: 37709 - DNA, 15 bp, Homo sapiens
aataaactgattttt

SEQ ID NO: 37710 - DNA, 15 bp, Homo sapiens
ataaactgatttttt

SEQ ID NO: 37711 - DNA, 15 bp, Homo sapiens
taaactgattttttt

SEQ ID NO: 37712 - DNA, 15 bp, Homo sapiens
aaactgatttttttt

SEQ ID NO: 37713 - DNA, 15 bp, Homo sapiens
aactgattttttttc

SEQ ID NO: 37714 - DNA, 15 bp, Homo sapiens
actgattttttttca

SEQ ID NO: 37715 - DNA, 15 bp, Homo sapiens
ctgattttttttcaa

SEQ ID NO: 37716 - DNA, 15 bp, Homo sapiens
tgattttttttcaac

SEQ ID NO: 37717 - DNA, 15 bp, Homo sapiens
gattttttttcaact

SEQ ID NO: 37718 - DNA, 15 bp, Homo sapiens
attttttttcaactt

SEQ ID NO: 37719 - DNA, 15 bp, Homo sapiens
ttttttttcaactta

SEQ ID NO: 37720 - DNA, 15 bp, Homo sapiens
tttttttcaacttaa

SEQ ID NO: 37721 - DNA, 15 bp, Homo sapiens
ttttttcaacttaat

SEQ ID NO: 37722 - DNA, 15 bp, Homo sapiens
tttttcaacttaatt

SEQ ID NO: 37723 - DNA, 15 bp, Homo sapiens
ttttcaacttaatta

SEQ ID NO: 37724 - DNA, 15 bp, Homo sapiens
tttcaacttaattaa

SEQ ID NO: 37725 - DNA, 15 bp, Homo sapiens
ttcaacttaattaac

SEQ ID NO: 37726 - DNA, 15 bp, Homo sapiens
tcaacttaattaaca

SEQ ID NO: 37727 - DNA, 15 bp, Homo sapiens
caacttaattaacac

SEQ ID NO: 37728 - DNA, 15 bp, Homo sapiens
aacttaattaacact

SEQ ID NO: 37729 - DNA, 15 bp, Homo sapiens
acttaattaacactg

SEQ ID NO: 37730 - DNA, 15 bp, Homo sapiens
cttaattaacactgt

SEQ ID NO: 37731 - DNA, 15 bp, Homo sapiens
ttaattaacactgtt

SEQ ID NO: 37732 - DNA, 15 bp, Homo sapiens
taattaacactgtta

SEQ ID NO: 37733 - DNA, 15 bp, Homo sapiens
aattaacactgttaa

SEQ ID NO: 37734 - DNA, 15 bp, Homo sapiens
attaacactgttaat

SEQ ID NO: 37735 - DNA, 15 bp, Homo sapiens
ttaacactgttaatt

SEQ ID NO: 37736 - DNA, 15 bp, Homo sapiens
taacactgttaattc

SEQ ID NO: 37737 - DNA, 15 bp, Homo sapiens
aacactgttaattca

SEQ ID NO: 37738 - DNA, 15 bp, Homo sapiens
acactgttaattcaa

SEQ ID NO: 37739 - DNA, 15 bp, Homo sapiens
cactgttaattcaaa

SEQ ID NO: 37740 - DNA, 15 bp, Homo sapiens
actgttaattcaaac

SEQ ID NO: 37741 - DNA, 15 bp, Homo sapiens
ctgttaattcaaaca

SEQ ID NO: 37742 - DNA, 15 bp, Homo sapiens
tgttaattcaaacaa

SEQ ID NO: 37743 - DNA, 15 bp, Homo sapiens
gttaattcaaacaag

SEQ ID NO: 37744 - DNA, 15 bp, Homo sapiens
ttaattcaaacaagc

SEQ ID NO: 37745 - DNA, 15 bp, Homo sapiens
taattcaaacaagct

SEQ ID NO: 37746 - DNA, 15 bp, Homo sapiens
aattcaaacaagctc

SEQ ID NO: 37747 - DNA, 15 bp, Homo sapiens
attcaaacaagctcc

SEQ ID NO: 37748 - DNA, 15 bp, Homo sapiens
ttcaaacaagctcca

SEQ ID NO: 37749 - DNA, 15 bp, Homo sapiens
tcaaacaagctccaa

SEQ ID NO: 37750 - DNA, 15 bp, Homo sapiens
caaacaagctccaac

SEQ ID NO: 37751 - DNA, 15 bp, Homo sapiens
aaacaagctccaaca

SEQ ID NO: 37752 - DNA, 15 bp, Homo sapiens
aacaagctccaacac

SEQ ID NO: 37753 - DNA, 15 bp, Homo sapiens
acaagctccaacact

SEQ ID NO: 37754 - DNA, 15 bp, Homo sapiens
caagctccaacactt

SEQ ID NO: 37755 - DNA, 15 bp, Homo sapiens
aagctccaacactta

SEQ ID NO: 37756 - DNA, 15 bp, Homo sapiens
agctccaacacttat

SEQ ID NO: 37757 - DNA, 15 bp, Homo sapiens
gctccaacacttatg

SEQ ID NO: 37758 - DNA, 15 bp, Homo sapiens
ctccaacacttatgt

SEQ ID NO: 37759 - DNA, 15 bp, Homo sapiens
tccaacacttatgtt

SEQ ID NO: 37760 - DNA, 15 bp, Homo sapiens
ccaacacttatgttt

SEQ ID NO: 37761 - DNA, 15 bp, Homo sapiens
caacacttatgttta

SEQ ID NO: 37762 - DNA, 15 bp, Homo sapiens
aacacttatgtttac

SEQ ID NO: 37763 - DNA, 15 bp, Homo sapiens
acacttatgtttaca

SEQ ID NO: 37764 - DNA, 15 bp, Homo sapiens
cacttatgtttacaa

SEQ ID NO: 37765 - DNA, 15 bp, Homo sapiens
acttatgtttacaaa

SEQ ID NO: 37766 - DNA, 15 bp, Homo sapiens
cttatgtttacaaaa

SEQ ID NO: 37767 - DNA, 15 bp, Homo sapiens
ttatgtttacaaaaa

SEQ ID NO: 37768 - DNA, 15 bp, Homo sapiens
tatgtttacaaaaaa

SEQ ID NO: 37769 - DNA, 15 bp, Homo sapiens
atgtttacaaaaaag

SEQ ID NO: 37770 - DNA, 15 bp, Homo sapiens
tgtttacaaaaaaga

SEQ ID NO: 37771 - DNA, 15 bp, Homo sapiens
gtttacaaaaaagaa

SEQ ID NO: 37772 - DNA, 15 bp, Homo sapiens
tttacaaaaaagaaa

SEQ ID NO: 37773 - DNA, 15 bp, Homo sapiens
ttacaaaaaagaaaa

SEQ ID NO: 37774 - DNA, 15 bp, Homo sapiens
tacaaaaaagaaaaa

SEQ ID NO: 37775 - DNA, 15 bp, Homo sapiens
acaaaaaagaaaaat

SEQ ID NO: 37776 - DNA, 15 bp, Homo sapiens
caaaaaagaaaaata

SEQ ID NO: 37777 - DNA, 15 bp, Homo sapiens
aaaaaagaaaaataa

SEQ ID NO: 37778 - DNA, 15 bp, Homo sapiens
aaaaagaaaaataaa

SEQ ID NO: 37779 - DNA, 15 bp, Homo sapiens
aaaagaaaaataaaa

SEQ ID NO: 37780 - DNA, 15 bp, Homo sapiens
aaagaaaaataaaaa

SEQ ID NO: 37781 - DNA, 15 bp, Homo sapiens
aagaaaaataaaaac

SEQ ID NO: 37782 - DNA, 15 bp, Homo sapiens
agaaaaataaaaaca

SEQ ID NO: 37783 - DNA, 15 bp, Homo sapiens
gaaaaataaaaacaa

SEQ ID NO: 37784 - DNA, 15 bp, Homo sapiens
aaaaataaaaacaat

SEQ ID NO: 37785 - DNA, 15 bp, Homo sapiens
aaaataaaaacaatt

SEQ ID NO: 37786 - DNA, 15 bp, Homo sapiens
aaataaaaacaatta

SEQ ID NO: 37787 - DNA, 15 bp, Homo sapiens
aataaaaacaattag

SEQ ID NO: 37788 - DNA, 15 bp, Homo sapiens
ataaaaacaattagc

SEQ ID NO: 37789 - DNA, 15 bp, Homo sapiens
taaaaacaattagct

SEQ ID NO: 37790 - DNA, 15 bp, Homo sapiens
aaaaacaattagctt

SEQ ID NO: 37791 - DNA, 15 bp, Homo sapiens
aaaacaattagcttt

SEQ ID NO: 37792 - DNA, 15 bp, Homo sapiens
aaacaattagcttta

SEQ ID NO: 37793 - DNA, 15 bp, Homo sapiens
aacaattagctttat

SEQ ID NO: 37794 - DNA, 15 bp, Homo sapiens
acaattagctttatc

SEQ ID NO: 37795 - DNA, 15 bp, Homo sapiens
caattagctttatca

SEQ ID NO: 37796 - DNA, 15 bp, Homo sapiens
aattagctttatcaa

SEQ ID NO: 37797 - DNA, 15 bp, Homo sapiens
attagctttatcaat

SEQ ID NO: 37798 - DNA, 15 bp, Homo sapiens
ttagctttatcaatc

SEQ ID NO: 37799 - DNA, 15 bp, Homo sapiens
tagctttatcaatct

SEQ ID NO: 37800 - DNA, 15 bp, Homo sapiens
agctttatcaatctg

SEQ ID NO: 37801 - DNA, 15 bp, Homo sapiens
gctttatcaatctgg

SEQ ID NO: 37802 - DNA, 15 bp, Homo sapiens
ctttatcaatctggt

SEQ ID NO: 37803 - DNA, 15 bp, Homo sapiens
tttatcaatctggtc

SEQ ID NO: 37804 - DNA, 15 bp, Homo sapiens
ttatcaatctggtct

SEQ ID NO: 37805 - DNA, 15 bp, Homo sapiens
tatcaatctggtctc

SEQ ID NO: 37806 - DNA, 15 bp, Homo sapiens
atcaatctggtctca

SEQ ID NO: 37807 - DNA, 15 bp, Homo sapiens
tcaatctggtctcaa

SEQ ID NO: 37808 - DNA, 15 bp, Homo sapiens
caatctggtctcaat

SEQ ID NO: 37809 - DNA, 15 bp, Homo sapiens
aatctggtctcaata

SEQ ID NO: 37810 - DNA, 15 bp, Homo sapiens
atctggtctcaatac

SEQ ID NO: 37811 - DNA, 15 bp, Homo sapiens
tctggtctcaatacc

SEQ ID NO: 37812 - DNA, 15 bp, Homo sapiens
ctggtctcaatacca

SEQ ID NO: 37813 - DNA, 15 bp, Homo sapiens
tggtctcaataccac

SEQ ID NO: 37814 - DNA, 15 bp, Homo sapiens
ggtctcaataccacc

SEQ ID NO: 37815 - DNA, 15 bp, Homo sapiens
gtctcaataccacct

SEQ ID NO: 37816 - DNA, 15 bp, Homo sapiens
tctcaataccacctg

SEQ ID NO: 37817 - DNA, 15 bp, Homo sapiens
ctcaataccacctgt

SEQ ID NO: 37818 - DNA, 15 bp, Homo sapiens
tcaataccacctgtg

SEQ ID NO: 37819 - DNA, 15 bp, Homo sapiens
caataccacctgtgt

SEQ ID NO: 37820 - DNA, 15 bp, Homo sapiens
aataccacctgtgtg

SEQ ID NO: 37821 - DNA, 15 bp, Homo sapiens
ataccacctgtgtga

SEQ ID NO: 37822 - DNA, 15 bp, Homo sapiens
taccacctgtgtgac

SEQ ID NO: 37823 - DNA, 15 bp, Homo sapiens
accacctgtgtgacc

SEQ ID NO: 37824 - DNA, 15 bp, Homo sapiens
ccacctgtgtgacct

SEQ ID NO: 37825 - DNA, 15 bp, Homo sapiens
cacctgtgtgacctt

SEQ ID NO: 37826 - DNA, 15 bp, Homo sapiens
acctgtgtgaccttg

SEQ ID NO: 37827 - DNA, 15 bp, Homo sapiens
cctgtgtgaccttgg

SEQ ID NO: 37828 - DNA, 15 bp, Homo sapiens
ctgtgtgaccttggg

SEQ ID NO: 37829 - DNA, 15 bp, Homo sapiens
tgtgtgaccttgggc

SEQ ID NO: 37830 - DNA, 15 bp, Homo sapiens
gtgtgaccttgggca

SEQ ID NO: 37831 - DNA, 15 bp, Homo sapiens
tgtgaccttgggcaa

SEQ ID NO: 37832 - DNA, 15 bp, Homo sapiens
gtgaccttgggcaag

SEQ ID NO: 37833 - DNA, 15 bp, Homo sapiens
tgaccttgggcaagt

SEQ ID NO: 37834 - DNA, 15 bp, Homo sapiens
gaccttgggcaagtt

SEQ ID NO: 37835 - DNA, 15 bp, Homo sapiens
accttgggcaagtta

SEQ ID NO: 37836 - DNA, 15 bp, Homo sapiens
ccttgggcaagttac

SEQ ID NO: 37837 - DNA, 15 bp, Homo sapiens
cttgggcaagttaca

SEQ ID NO: 37838 - DNA, 15 bp, Homo sapiens
ttgggcaagttacat

SEQ ID NO: 37839 - DNA, 15 bp, Homo sapiens
tgggcaagttacatg

SEQ ID NO: 37840 - DNA, 15 bp, Homo sapiens
gggcaagttacatga

SEQ ID NO: 37841 - DNA, 15 bp, Homo sapiens
ggcaagttacatgat

SEQ ID NO: 37842 - DNA, 15 bp, Homo sapiens
gcaagttacatgatg

SEQ ID NO: 37843 - DNA, 15 bp, Homo sapiens
caagttacatgatgt

SEQ ID NO: 37844 - DNA, 15 bp, Homo sapiens
aagttacatgatgtc

SEQ ID NO: 37845 - DNA, 15 bp, Homo sapiens
agttacatgatgtcc

SEQ ID NO: 37846 - DNA, 15 bp, Homo sapiens
gttacatgatgtcct

SEQ ID NO: 37847 - DNA, 15 bp, Homo sapiens
ttacatgatgtcctt

SEQ ID NO: 37848 - DNA, 15 bp, Homo sapiens
tacatgatgtcctta

SEQ ID NO: 37849 - DNA, 15 bp, Homo sapiens
acatgatgtccttat

SEQ ID NO: 37850 - DNA, 15 bp, Homo sapiens
catgatgtccttatg

SEQ ID NO: 37851 - DNA, 15 bp, Homo sapiens
atgatgtccttatgt

SEQ ID NO: 37852 - DNA, 15 bp, Homo sapiens
tgatgtccttatgtc

SEQ ID NO: 37853 - DNA, 15 bp, Homo sapiens
gatgtccttatgtct

SEQ ID NO: 37854 - DNA, 15 bp, Homo sapiens
atgtccttatgtctc

SEQ ID NO: 37855 - DNA, 15 bp, Homo sapiens
tgtccttatgtctca

SEQ ID NO: 37856 - DNA, 15 bp, Homo sapiens
gtccttatgtctcag

SEQ ID NO: 37857 - DNA, 15 bp, Homo sapiens
tccttatgtctcagt

SEQ ID NO: 37858 - DNA, 15 bp, Homo sapiens
ccttatgtctcagtt

SEQ ID NO: 37859 - DNA, 15 bp, Homo sapiens
cttatgtctcagttt

SEQ ID NO: 37860 - DNA, 15 bp, Homo sapiens
ttatgtctcagtttc

SEQ ID NO: 37861 - DNA, 15 bp, Homo sapiens
tatgtctcagtttct

SEQ ID NO: 37862 - DNA, 15 bp, Homo sapiens
atgtctcagtttctt

SEQ ID NO: 37863 - DNA, 15 bp, Homo sapiens
tgtctcagtttcttt

SEQ ID NO: 37864 - DNA, 15 bp, Homo sapiens
gtctcagtttctttc

SEQ ID NO: 37865 - DNA, 15 bp, Homo sapiens
tctcagtttctttca

SEQ ID NO: 37866 - DNA, 15 bp, Homo sapiens
ctcagtttctttcac

SEQ ID NO: 37867 - DNA, 15 bp, Homo sapiens
tcagtttctttcact

SEQ ID NO: 37868 - DNA, 15 bp, Homo sapiens
cagtttctttcactg

SEQ ID NO: 37869 - DNA, 15 bp, Homo sapiens
agtttctttcactgt

SEQ ID NO: 37870 - DNA, 15 bp, Homo sapiens
gtttctttcactgta

SEQ ID NO: 37871 - DNA, 15 bp, Homo sapiens
tttctttcactgtac

SEQ ID NO: 37872 - DNA, 15 bp, Homo sapiens
ttctttcactgtaca

SEQ ID NO: 37873 - DNA, 15 bp, Homo sapiens
tctttcactgtacaa

SEQ ID NO: 37874 - DNA, 15 bp, Homo sapiens
ctttcactgtacaat

SEQ ID NO: 37875 - DNA, 15 bp, Homo sapiens
tttcactgtacaatg

SEQ ID NO: 37876 - DNA, 15 bp, Homo sapiens
ttcactgtacaatgg

SEQ ID NO: 37877 - DNA, 15 bp, Homo sapiens
tcactgtacaatgga

SEQ ID NO: 37878 - DNA, 15 bp, Homo sapiens
cactgtacaatggaa

SEQ ID NO: 37879 - DNA, 15 bp, Homo sapiens
actgtacaatggaaa

SEQ ID NO: 37880 - DNA, 15 bp, Homo sapiens
ctgtacaatggaaat

SEQ ID NO: 37881 - DNA, 15 bp, Homo sapiens
tgtacaatggaaata

SEQ ID NO: 37882 - DNA, 15 bp, Homo sapiens
gtacaatggaaataa

SEQ ID NO: 37883 - DNA, 15 bp, Homo sapiens
tacaatggaaataac

SEQ ID NO: 37884 - DNA, 15 bp, Homo sapiens
acaatggaaataaca

SEQ ID NO: 37885 - DNA, 15 bp, Homo sapiens
caatggaaataacag

SEQ ID NO: 37886 - DNA, 15 bp, Homo sapiens
aatggaaataacagt

SEQ ID NO: 37887 - DNA, 15 bp, Homo sapiens
atggaaataacagta

SEQ ID NO: 37888 - DNA, 15 bp, Homo sapiens
tggaaataacagtac

SEQ ID NO: 37889 - DNA, 15 bp, Homo sapiens
ggaaataacagtacc

SEQ ID NO: 37890 - DNA, 15 bp, Homo sapiens
gaaataacagtacct

SEQ ID NO: 37891 - DNA, 15 bp, Homo sapiens
aaataacagtacctt

SEQ ID NO: 37892 - DNA, 15 bp, Homo sapiens
aataacagtaccttc

SEQ ID NO: 37893 - DNA, 15 bp, Homo sapiens
ataacagtaccttcc

SEQ ID NO: 37894 - DNA, 15 bp, Homo sapiens
taacagtaccttcca

SEQ ID NO: 37895 - DNA, 15 bp, Homo sapiens
aacagtaccttccat

SEQ ID NO: 37896 - DNA, 15 bp, Homo sapiens
acagtaccttccata

SEQ ID NO: 37897 - DNA, 15 bp, Homo sapiens
cagtaccttccatat

SEQ ID NO: 37898 - DNA, 15 bp, Homo sapiens
agtaccttccatata

SEQ ID NO: 37899 - DNA, 15 bp, Homo sapiens
gtaccttccatataa

SEQ ID NO: 37900 - DNA, 15 bp, Homo sapiens
taccttccatataag

SEQ ID NO: 37901 - DNA, 15 bp, Homo sapiens
accttccatataagg

SEQ ID NO: 37902 - DNA, 15 bp, Homo sapiens
ccttccatataaggg

SEQ ID NO: 37903 - DNA, 15 bp, Homo sapiens
cttccatataagggt

SEQ ID NO: 37904 - DNA, 15 bp, Homo sapiens
ttccatataagggtt

SEQ ID NO: 37905 - DNA, 15 bp, Homo sapiens
tccatataagggtta

SEQ ID NO: 37906 - DNA, 15 bp, Homo sapiens
ccatataagggttat

SEQ ID NO: 37907 - DNA, 15 bp, Homo sapiens
catataagggttatg

SEQ ID NO: 37908 - DNA, 15 bp, Homo sapiens
atataagggttatga

SEQ ID NO: 37909 - DNA, 15 bp, Homo sapiens
tataagggttatgag

SEQ ID NO: 37910 - DNA, 15 bp, Homo sapiens
ataagggttatgagg

SEQ ID NO: 37911 - DNA, 15 bp, Homo sapiens
taagggttatgagga

SEQ ID NO: 37912 - DNA, 15 bp, Homo sapiens
aagggttatgaggaa

SEQ ID NO: 37913 - DNA, 15 bp, Homo sapiens
agggttatgaggaag

SEQ ID NO: 37914 - DNA, 15 bp, Homo sapiens
gggttatgaggaaga

SEQ ID NO: 37915 - DNA, 15 bp, Homo sapiens
ggttatgaggaagag

SEQ ID NO: 37916 - DNA, 15 bp, Homo sapiens
gttatgaggaagagt

SEQ ID NO: 37917 - DNA, 15 bp, Homo sapiens
ttatgaggaagagtt

SEQ ID NO: 37918 - DNA, 15 bp, Homo sapiens
tatgaggaagagtta

SEQ ID NO: 37919 - DNA, 15 bp, Homo sapiens
atgaggaagagttat

SEQ ID NO: 37920 - DNA, 15 bp, Homo sapiens
tgaggaagagttatg

SEQ ID NO: 37921 - DNA, 15 bp, Homo sapiens
gaggaagagttatga

SEQ ID NO: 37922 - DNA, 15 bp, Homo sapiens
aggaagagttatgag

SEQ ID NO: 37923 - DNA, 15 bp, Homo sapiens
ggaagagttatgagt

SEQ ID NO: 37924 - DNA, 15 bp, Homo sapiens
gaagagttatgagtt

SEQ ID NO: 37925 - DNA, 15 bp, Homo sapiens
aagagttatgagttc

SEQ ID NO: 37926 - DNA, 15 bp, Homo sapiens
agagttatgagttca

SEQ ID NO: 37927 - DNA, 15 bp, Homo sapiens
gagttatgagttcag

SEQ ID NO: 37928 - DNA, 15 bp, Homo sapiens
agttatgagttcagt

SEQ ID NO: 37929 - DNA, 15 bp, Homo sapiens
gttatgagttcagtt

SEQ ID NO: 37930 - DNA, 15 bp, Homo sapiens
ttatgagttcagtta

SEQ ID NO: 37931 - DNA, 15 bp, Homo sapiens
tatgagttcagttaa

SEQ ID NO: 37932 - DNA, 15 bp, Homo sapiens
atgagttcagttaac

SEQ ID NO: 37933 - DNA, 15 bp, Homo sapiens
tgagttcagttaaca

SEQ ID NO: 37934 - DNA, 15 bp, Homo sapiens
gagttcagttaacaa

SEQ ID NO: 37935 - DNA, 15 bp, Homo sapiens
agttcagttaacaac

SEQ ID NO: 37936 - DNA, 15 bp, Homo sapiens
gttcagttaacaact

SEQ ID NO: 37937 - DNA, 15 bp, Homo sapiens
ttcagttaacaactg

SEQ ID NO: 37938 - DNA, 15 bp, Homo sapiens
tcagttaacaactga

SEQ ID NO: 37939 - DNA, 15 bp, Homo sapiens
cagttaacaactgaa

SEQ ID NO: 37940 - DNA, 15 bp, Homo sapiens
agttaacaactgaac

SEQ ID NO: 37941 - DNA, 15 bp, Homo sapiens
gttaacaactgaacc

SEQ ID NO: 37942 - DNA, 15 bp, Homo sapiens
ttaacaactgaacca

SEQ ID NO: 37943 - DNA, 15 bp, Homo sapiens
taacaactgaaccac

SEQ ID NO: 37944 - DNA, 15 bp, Homo sapiens
aacaactgaaccaca

SEQ ID NO: 37945 - DNA, 15 bp, Homo sapiens
acaactgaaccacaa

SEQ ID NO: 37946 - DNA, 15 bp, Homo sapiens
caactgaaccacaaa

SEQ ID NO: 37947 - DNA, 15 bp, Homo sapiens
aactgaaccacaaaa

SEQ ID NO: 37948 - DNA, 15 bp, Homo sapiens
actgaaccacaaaat

SEQ ID NO: 37949 - DNA, 15 bp, Homo sapiens
ctgaaccacaaaata

SEQ ID NO: 37950 - DNA, 15 bp, Homo sapiens
tgaaccacaaaatac

SEQ ID NO: 37951 - DNA, 15 bp, Homo sapiens
gaaccacaaaataca

SEQ ID NO: 37952 - DNA, 15 bp, Homo sapiens
aaccacaaaatacat

SEQ ID NO: 37953 - DNA, 15 bp, Homo sapiens
accacaaaatacata

SEQ ID NO: 37954 - DNA, 15 bp, Homo sapiens
ccacaaaatacataa

SEQ ID NO: 37955 - DNA, 15 bp, Homo sapiens
cacaaaatacataaa

SEQ ID NO: 37956 - DNA, 15 bp, Homo sapiens
acaaaatacataaaa

SEQ ID NO: 37957 - DNA, 15 bp, Homo sapiens
caaaatacataaaaa

SEQ ID NO: 37958 - DNA, 15 bp, Homo sapiens
aaaatacataaaaaa

SEQ ID NO: 37959 - DNA, 15 bp, Homo sapiens
aaatacataaaaaag

SEQ ID NO: 37960 - DNA, 15 bp, Homo sapiens
aatacataaaaaagg

SEQ ID NO: 37961 - DNA, 15 bp, Homo sapiens
atacataaaaaaggg

SEQ ID NO: 37962 - DNA, 15 bp, Homo sapiens
tacataaaaaagggc

SEQ ID NO: 37963 - DNA, 15 bp, Homo sapiens
acataaaaaagggct

SEQ ID NO: 37964 - DNA, 15 bp, Homo sapiens
cataaaaaagggctt

SEQ ID NO: 37965 - DNA, 15 bp, Homo sapiens
ataaaaaagggctta

SEQ ID NO: 37966 - DNA, 15 bp, Homo sapiens
taaaaaagggcttag

SEQ ID NO: 37967 - DNA, 15 bp, Homo sapiens
aaaaaagggcttagc

SEQ ID NO: 37968 - DNA, 15 bp, Homo sapiens
aaaaagggcttagca

SEQ ID NO: 37969 - DNA, 15 bp, Homo sapiens
aaaagggcttagcaa

SEQ ID NO: 37970 - DNA, 15 bp, Homo sapiens
aaagggcttagcaag

SEQ ID NO: 37971 - DNA, 15 bp, Homo sapiens
aagggcttagcaagc

SEQ ID NO: 37972 - DNA, 15 bp, Homo sapiens
agggcttagcaagca

SEQ ID NO: 37973 - DNA, 15 bp, Homo sapiens
gggcttagcaagcaa

SEQ ID NO: 37974 - DNA, 15 bp, Homo sapiens
ggcttagcaagcaaa

SEQ ID NO: 37975 - DNA, 15 bp, Homo sapiens
gcttagcaagcaaaa

SEQ ID NO: 37976 - DNA, 15 bp, Homo sapiens
cttagcaagcaaaag

SEQ ID NO: 37977 - DNA, 15 bp, Homo sapiens
ttagcaagcaaaagt

SEQ ID NO: 37978 - DNA, 15 bp, Homo sapiens
tagcaagcaaaagtg

SEQ ID NO: 37979 - DNA, 15 bp, Homo sapiens
agcaagcaaaagtgt

SEQ ID NO: 37980 - DNA, 15 bp, Homo sapiens
gcaagcaaaagtgtt

SEQ ID NO: 37981 - DNA, 15 bp, Homo sapiens
caagcaaaagtgtta

SEQ ID NO: 37982 - DNA, 15 bp, Homo sapiens
aagcaaaagtgttat

SEQ ID NO: 37983 - DNA, 15 bp, Homo sapiens
agcaaaagtgttatg

SEQ ID NO: 37984 - DNA, 15 bp, Homo sapiens
gcaaaagtgttatgt

SEQ ID NO: 37985 - DNA, 15 bp, Homo sapiens
caaaagtgttatgtt

SEQ ID NO: 37986 - DNA, 15 bp, Homo sapiens
aaaagtgttatgtta

SEQ ID NO: 37987 - DNA, 15 bp, Homo sapiens
aaagtgttatgttac

SEQ ID NO: 37988 - DNA, 15 bp, Homo sapiens
aagtgttatgttaca

SEQ ID NO: 37989 - DNA, 15 bp, Homo sapiens
agtgttatgttacat

SEQ ID NO: 37990 - DNA, 15 bp, Homo sapiens
gtgttatgttacatt

SEQ ID NO: 37991 - DNA, 15 bp, Homo sapiens
tgttatgttacattg

SEQ ID NO: 37992 - DNA, 15 bp, Homo sapiens
gttatgttacattgg

SEQ ID NO: 37993 - DNA, 15 bp, Homo sapiens
ttatgttacattggt

SEQ ID NO: 37994 - DNA, 15 bp, Homo sapiens
tatgttacattggta

SEQ ID NO: 37995 - DNA, 15 bp, Homo sapiens
atgttacattggtac

SEQ ID NO: 37996 - DNA, 15 bp, Homo sapiens
tgttacattggtacc

SEQ ID NO: 37997 - DNA, 15 bp, Homo sapiens
gttacattggtacca

SEQ ID NO: 37998 - DNA, 15 bp, Homo sapiens
ttacattggtaccaa

SEQ ID NO: 37999 - DNA, 15 bp, Homo sapiens
tacattggtaccaat

SEQ ID NO: 38000 - DNA, 15 bp, Homo sapiens
acattggtaccaatt

SEQ ID NO: 38001 - DNA, 15 bp, Homo sapiens
cattggtaccaatta

SEQ ID NO: 38002 - DNA, 15 bp, Homo sapiens
attggtaccaattaa

SEQ ID NO: 38003 - DNA, 15 bp, Homo sapiens
ttggtaccaattaat

SEQ ID NO: 38004 - DNA, 15 bp, Homo sapiens
tggtaccaattaatc

SEQ ID NO: 38005 - DNA, 15 bp, Homo sapiens
ggtaccaattaatca

SEQ ID NO: 38006 - DNA, 15 bp, Homo sapiens
gtaccaattaatcat

SEQ ID NO: 38007 - DNA, 15 bp, Homo sapiens
taccaattaatcata

SEQ ID NO: 38008 - DNA, 15 bp, Homo sapiens
accaattaatcataa

SEQ ID NO: 38009 - DNA, 15 bp, Homo sapiens
ccaattaatcataag

SEQ ID NO: 38010 - DNA, 15 bp, Homo sapiens
caattaatcataaga

SEQ ID NO: 38011 - DNA, 15 bp, Homo sapiens
aattaatcataagaa

SEQ ID NO: 38012 - DNA, 15 bp, Homo sapiens
attaatcataagaaa

SEQ ID NO: 38013 - DNA, 15 bp, Homo sapiens
ttaatcataagaaat

SEQ ID NO: 38014 - DNA, 15 bp, Homo sapiens
taatcataagaaata

SEQ ID NO: 38015 - DNA, 15 bp, Homo sapiens
aatcataagaaatat

SEQ ID NO: 38016 - DNA, 15 bp, Homo sapiens
atcataagaaatatt

SEQ ID NO: 38017 - DNA, 15 bp, Homo sapiens
tcataagaaatattg

SEQ ID NO: 38018 - DNA, 15 bp, Homo sapiens
cataagaaatattgg

SEQ ID NO: 38019 - DNA, 15 bp, Homo sapiens
ataagaaatattggc

SEQ ID NO: 38020 - DNA, 15 bp, Homo sapiens
taagaaatattggct

SEQ ID NO: 38021 - DNA, 15 bp, Homo sapiens
aagaaatattggctg

SEQ ID NO: 38022 - DNA, 15 bp, Homo sapiens
agaaatattggctgg

SEQ ID NO: 38023 - DNA, 15 bp, Homo sapiens
gaaatattggctggg

SEQ ID NO: 38024 - DNA, 15 bp, Homo sapiens
aaatattggctggga

SEQ ID NO: 38025 - DNA, 15 bp, Homo sapiens
aatattggctgggaa

SEQ ID NO: 38026 - DNA, 15 bp, Homo sapiens
atattggctgggaat

SEQ ID NO: 38027 - DNA, 15 bp, Homo sapiens
tattggctgggaata

SEQ ID NO: 38028 - DNA, 15 bp, Homo sapiens
attggctgggaatag

SEQ ID NO: 38029 - DNA, 15 bp, Homo sapiens
ttggctgggaatagt

SEQ ID NO: 38030 - DNA, 15 bp, Homo sapiens
tggctgggaatagtg

SEQ ID NO: 38031 - DNA, 15 bp, Homo sapiens
ggctgggaatagtgg

SEQ ID NO: 38032 - DNA, 15 bp, Homo sapiens
gctgggaatagtggc

SEQ ID NO: 38033 - DNA, 15 bp, Homo sapiens
ctgggaatagtggct

SEQ ID NO: 38034 - DNA, 15 bp, Homo sapiens
tgggaatagtggctt

SEQ ID NO: 38035 - DNA, 15 bp, Homo sapiens
gggaatagtggctta

SEQ ID NO: 38036 - DNA, 15 bp, Homo sapiens
ggaatagtggcttat

SEQ ID NO: 38037 - DNA, 15 bp, Homo sapiens
gaatagtggcttatg

SEQ ID NO: 38038 - DNA, 15 bp, Homo sapiens
aatagtggcttatgc

SEQ ID NO: 38039 - DNA, 15 bp, Homo sapiens
atagtggcttatgcc

SEQ ID NO: 38040 - DNA, 15 bp, Homo sapiens
tagtggcttatgcct

SEQ ID NO: 38041 - DNA, 15 bp, Homo sapiens
agtggcttatgcctg

SEQ ID NO: 38042 - DNA, 15 bp, Homo sapiens
gtggcttatgcctgt

SEQ ID NO: 38043 - DNA, 15 bp, Homo sapiens
tggcttatgcctgta

SEQ ID NO: 38044 - DNA, 15 bp, Homo sapiens
ggcttatgcctgtaa

SEQ ID NO: 38045 - DNA, 15 bp, Homo sapiens
gcttatgcctgtaat

SEQ ID NO: 38046 - DNA, 15 bp, Homo sapiens
cttatgcctgtaatc

SEQ ID NO: 38047 - DNA, 15 bp, Homo sapiens
ttatgcctgtaatcc

SEQ ID NO: 38048 - DNA, 15 bp, Homo sapiens
tatgcctgtaatccc

SEQ ID NO: 38049 - DNA, 15 bp, Homo sapiens
atgcctgtaatccca

SEQ ID NO: 38050 - DNA, 15 bp, Homo sapiens
tgcctgtaatcccag

SEQ ID NO: 38051 - DNA, 15 bp, Homo sapiens
gcctgtaatcccagc

SEQ ID NO: 38052 - DNA, 15 bp, Homo sapiens
cctgtaatcccagca

SEQ ID NO: 38053 - DNA, 15 bp, Homo sapiens
ctgtaatcccagcac

SEQ ID NO: 38054 - DNA, 15 bp, Homo sapiens
tgtaatcccagcact

SEQ ID NO: 38055 - DNA, 15 bp, Homo sapiens
gtaatcccagcactt

SEQ ID NO: 38056 - DNA, 15 bp, Homo sapiens
taatcccagcacttt

SEQ ID NO: 38057 - DNA, 15 bp, Homo sapiens
aatcccagcactttg

SEQ ID NO: 38058 - DNA, 15 bp, Homo sapiens
atcccagcactttgg

SEQ ID NO: 38059 - DNA, 15 bp, Homo sapiens
tcccagcactttggg

SEQ ID NO: 38060 - DNA, 15 bp, Homo sapiens
cccagcactttggga

SEQ ID NO: 38061 - DNA, 15 bp, Homo sapiens
gaggccgaggcgggt

SEQ ID NO: 38062 - DNA, 15 bp, Homo sapiens
aggccgaggcgggtg

SEQ ID NO: 38063 - DNA, 15 bp, Homo sapiens
ggccgaggcgggtgg

SEQ ID NO: 38064 - DNA, 15 bp, Homo sapiens
gccgaggcgggtgga

SEQ ID NO: 38065 - DNA, 15 bp, Homo sapiens
ccgaggcgggtggat

SEQ ID NO: 38066 - DNA, 15 bp, Homo sapiens
cgaggcgggtggatc

SEQ ID NO: 38067 - DNA, 15 bp, Homo sapiens
gaggcgggtggatca

SEQ ID NO: 38068 - DNA, 15 bp, Homo sapiens
aggcgggtggatcac

SEQ ID NO: 38069 - DNA, 15 bp, Homo sapiens
ggcgggtggatcacc

SEQ ID NO: 38070 - DNA, 15 bp, Homo sapiens
gcgggtggatcacct

SEQ ID NO: 38071 - DNA, 15 bp, Homo sapiens
cgggtggatcacctg

SEQ ID NO: 38072 - DNA, 15 bp, Homo sapiens
gggtggatcacctga

SEQ ID NO: 38073 - DNA, 15 bp, Homo sapiens
ggtggatcacctgag

SEQ ID NO: 38074 - DNA, 15 bp, Homo sapiens
gtggatcacctgagg

SEQ ID NO: 38075 - DNA, 15 bp, Homo sapiens
tggatcacctgaggt

SEQ ID NO: 38076 - DNA, 15 bp, Homo sapiens
ggatcacctgaggtc

SEQ ID NO: 38077 - DNA, 15 bp, Homo sapiens
gatcacctgaggtca

SEQ ID NO: 38078 - DNA, 15 bp, Homo sapiens
atcacctgaggtcaa

SEQ ID NO: 38079 - DNA, 15 bp, Homo sapiens
tcacctgaggtcaag

SEQ ID NO: 38080 - DNA, 15 bp, Homo sapiens
cacctgaggtcaaga

SEQ ID NO: 38081 - DNA, 15 bp, Homo sapiens
acctgaggtcaagag

SEQ ID NO: 38082 - DNA, 15 bp, Homo sapiens
cctgaggtcaagagt

SEQ ID NO: 38083 - DNA, 15 bp, Homo sapiens
ctgaggtcaagagtt

SEQ ID NO: 38084 - DNA, 15 bp, Homo sapiens
tgaggtcaagagttc

SEQ ID NO: 38085 - DNA, 15 bp, Homo sapiens
gaggtcaagagttca

SEQ ID NO: 38086 - DNA, 15 bp, Homo sapiens
aggtcaagagttcaa

SEQ ID NO: 38087 - DNA, 15 bp, Homo sapiens
ggtcaagagttcaag

SEQ ID NO: 38088 - DNA, 15 bp, Homo sapiens
gtcaagagttcaaga

SEQ ID NO: 38089 - DNA, 15 bp, Homo sapiens
tcaagagttcaagac

SEQ ID NO: 38090 - DNA, 15 bp, Homo sapiens
caagagttcaagacc

SEQ ID NO: 38091 - DNA, 15 bp, Homo sapiens
aagagttcaagacca

SEQ ID NO: 38092 - DNA, 15 bp, Homo sapiens
agagttcaagaccag

SEQ ID NO: 38093 - DNA, 15 bp, Homo sapiens
gagttcaagaccagc

SEQ ID NO: 38094 - DNA, 15 bp, Homo sapiens
agttcaagaccagcc

SEQ ID NO: 38095 - DNA, 15 bp, Homo sapiens
gttcaagaccagcct

SEQ ID NO: 38096 - DNA, 15 bp, Homo sapiens
ttcaagaccagcctg

SEQ ID NO: 38097 - DNA, 15 bp, Homo sapiens
tcaagaccagcctgg

SEQ ID NO: 38098 - DNA, 15 bp, Homo sapiens
caagaccagcctggc

SEQ ID NO: 38099 - DNA, 15 bp, Homo sapiens
aagaccagcctggcc

SEQ ID NO: 38100 - DNA, 15 bp, Homo sapiens
agaccagcctggcca

SEQ ID NO: 38101 - DNA, 15 bp, Homo sapiens
gaccagcctggccaa

SEQ ID NO: 38102 - DNA, 15 bp, Homo sapiens
accagcctggccaac

SEQ ID NO: 38103 - DNA, 15 bp, Homo sapiens
ccagcctggccaaca

SEQ ID NO: 38104 - DNA, 15 bp, Homo sapiens
cagcctggccaacat

SEQ ID NO: 38105 - DNA, 15 bp, Homo sapiens
acatggtgaaacccc

SEQ ID NO: 38106 - DNA, 15 bp, Homo sapiens
catggtgaaacccca

SEQ ID NO: 38107 - DNA, 15 bp, Homo sapiens
atggtgaaaccccaa

SEQ ID NO: 38108 - DNA, 15 bp, Homo sapiens
tggtgaaaccccaac

SEQ ID NO: 38109 - DNA, 15 bp, Homo sapiens
ggtgaaaccccaact

SEQ ID NO: 38110 - DNA, 15 bp, Homo sapiens
gtgaaaccccaactc

SEQ ID NO: 38111 - DNA, 15 bp, Homo sapiens
tgaaaccccaactct

SEQ ID NO: 38112 - DNA, 15 bp, Homo sapiens
gaaaccccaactcta

SEQ ID NO: 38113 - DNA, 15 bp, Homo sapiens
aaaccccaactctac

SEQ ID NO: 38114 - DNA, 15 bp, Homo sapiens
aaccccaactctact

SEQ ID NO: 38115 - DNA, 15 bp, Homo sapiens
accccaactctacta

SEQ ID NO: 38116 - DNA, 15 bp, Homo sapiens
ccccaactctactaa

SEQ ID NO: 38117 - DNA, 15 bp, Homo sapiens
cccaactctactaaa

SEQ ID NO: 38118 - DNA, 15 bp, Homo sapiens
ccaactctactaaaa

SEQ ID NO: 38119 - DNA, 15 bp, Homo sapiens
caactctactaaaaa

SEQ ID NO: 38120 - DNA, 15 bp, Homo sapiens
aactctactaaaaaa

SEQ ID NO: 38121 - DNA, 15 bp, Homo sapiens
actctactaaaaaaa

SEQ ID NO: 38122 - DNA, 15 bp, Homo sapiens
ctctactaaaaaaaa

SEQ ID NO: 38123 - DNA, 15 bp, Homo sapiens
tctactaaaaaaaat

SEQ ID NO: 38124 - DNA, 15 bp, Homo sapiens
ctactaaaaaaaata

SEQ ID NO: 38125 - DNA, 15 bp, Homo sapiens
tactaaaaaaaatac

SEQ ID NO: 38126 - DNA, 15 bp, Homo sapiens
actaaaaaaaataca

SEQ ID NO: 38127 - DNA, 15 bp, Homo sapiens
ctaaaaaaaatacaa

SEQ ID NO: 38128 - DNA, 15 bp, Homo sapiens
taaaaaaaatacaaa

SEQ ID NO: 38129 - DNA, 15 bp, Homo sapiens
aaaaaaaatacaaaa

SEQ ID NO: 38130 - DNA, 15 bp, Homo sapiens
aaaaaaatacaaaaa

SEQ ID NO: 38131 - DNA, 15 bp, Homo sapiens
aaaaaatacaaaaat

SEQ ID NO: 38132 - DNA, 15 bp, Homo sapiens
tacaaaaattagcca

SEQ ID NO: 38133 - DNA, 15 bp, Homo sapiens
acaaaaattagccag

SEQ ID NO: 38134 - DNA, 15 bp, Homo sapiens
caaaaattagccagg

SEQ ID NO: 38135 - DNA, 15 bp, Homo sapiens
aaaaattagccaggc

SEQ ID NO: 38136 - DNA, 15 bp, Homo sapiens
aaaattagccaggca

SEQ ID NO: 38137 - DNA, 15 bp, Homo sapiens
aaattagccaggcat

SEQ ID NO: 38138 - DNA, 15 bp, Homo sapiens
aattagccaggcatg

SEQ ID NO: 38139 - DNA, 15 bp, Homo sapiens
attagccaggcatgg

SEQ ID NO: 38140 - DNA, 15 bp, Homo sapiens
ttagccaggcatggt

SEQ ID NO: 38141 - DNA, 15 bp, Homo sapiens
tagccaggcatggtg

SEQ ID NO: 38142 - DNA, 15 bp, Homo sapiens
agccaggcatggtgg

SEQ ID NO: 38143 - DNA, 15 bp, Homo sapiens
gccaggcatggtggc

SEQ ID NO: 38144 - DNA, 15 bp, Homo sapiens
ccaggcatggtggcg

SEQ ID NO: 38145 - DNA, 15 bp, Homo sapiens
caggcatggtggcgg

SEQ ID NO: 38146 - DNA, 15 bp, Homo sapiens
aggcatggtggcggg

SEQ ID NO: 38147 - DNA, 15 bp, Homo sapiens
ggcatggtggcgggt

SEQ ID NO: 38148 - DNA, 15 bp, Homo sapiens
gcatggtggcgggtg

SEQ ID NO: 38149 - DNA, 15 bp, Homo sapiens
catggtggcgggtgc

SEQ ID NO: 38150 - DNA, 15 bp, Homo sapiens
atggtggcgggtgcc

SEQ ID NO: 38151 - DNA, 15 bp, Homo sapiens
tggtggcgggtgcct

SEQ ID NO: 38152 - DNA, 15 bp, Homo sapiens
ggtggcgggtgcctg

SEQ ID NO: 38153 - DNA, 15 bp, Homo sapiens
gtggcgggtgcctgt

SEQ ID NO: 38154 - DNA, 15 bp, Homo sapiens
tggcgggtgcctgta

SEQ ID NO: 38155 - DNA, 15 bp, Homo sapiens
ggcgggtgcctgtaa

SEQ ID NO: 38156 - DNA, 15 bp, Homo sapiens
gcgggtgcctgtaat

SEQ ID NO: 38157 - DNA, 15 bp, Homo sapiens
cgggtgcctgtaatc

SEQ ID NO: 38158 - DNA, 15 bp, Homo sapiens
gggtgcctgtaatcc

SEQ ID NO: 38159 - DNA, 15 bp, Homo sapiens
ggtgcctgtaatccc

SEQ ID NO: 38160 - DNA, 15 bp, Homo sapiens
gtgcctgtaatccca

SEQ ID NO: 38161 - DNA, 15 bp, Homo sapiens
taatcccagctactt

SEQ ID NO: 38162 - DNA, 15 bp, Homo sapiens
aatcccagctacttg

SEQ ID NO: 38163 - DNA, 15 bp, Homo sapiens
atcccagctacttgg

SEQ ID NO: 38164 - DNA, 15 bp, Homo sapiens
tcccagctacttggg

SEQ ID NO: 38165 - DNA, 15 bp, Homo sapiens
cccagctacttggga

SEQ ID NO: 38166 - DNA, 15 bp, Homo sapiens
ccagctacttgggag

SEQ ID NO: 38167 - DNA, 15 bp, Homo sapiens
cagctacttgggagg

SEQ ID NO: 38168 - DNA, 15 bp, Homo sapiens
agctacttgggaggc

SEQ ID NO: 38169 - DNA, 15 bp, Homo sapiens
gctacttgggaggcc

SEQ ID NO: 38170 - DNA, 15 bp, Homo sapiens
ctacttgggaggccg

SEQ ID NO: 38171 - DNA, 15 bp, Homo sapiens
tacttgggaggccga

SEQ ID NO: 38172 - DNA, 15 bp, Homo sapiens
acttgggaggccgag

SEQ ID NO: 38173 - DNA, 15 bp, Homo sapiens
cttgggaggccgagg

SEQ ID NO: 38174 - DNA, 15 bp, Homo sapiens
gggaggccgaggcag

SEQ ID NO: 38175 - DNA, 15 bp, Homo sapiens
ggaggccgaggcagg

SEQ ID NO: 38176 - DNA, 15 bp, Homo sapiens
gaggccgaggcagga

SEQ ID NO: 38177 - DNA, 15 bp, Homo sapiens
aggccgaggcaggag

SEQ ID NO: 38178 - DNA, 15 bp, Homo sapiens
ggccgaggcaggaga

SEQ ID NO: 38179 - DNA, 15 bp, Homo sapiens
gccgaggcaggagaa

SEQ ID NO: 38180 - DNA, 15 bp, Homo sapiens
ccgaggcaggagaag

SEQ ID NO: 38181 - DNA, 15 bp, Homo sapiens
cgaggcaggagaagc

SEQ ID NO: 38182 - DNA, 15 bp, Homo sapiens
gaggcaggagaagcg

SEQ ID NO: 38183 - DNA, 15 bp, Homo sapiens
aggcaggagaagcgc

SEQ ID NO: 38184 - DNA, 15 bp, Homo sapiens
ggcaggagaagcgct

SEQ ID NO: 38185 - DNA, 15 bp, Homo sapiens
gcaggagaagcgctt

SEQ ID NO: 38186 - DNA, 15 bp, Homo sapiens
caggagaagcgcttg

SEQ ID NO: 38187 - DNA, 15 bp, Homo sapiens
aggagaagcgcttga

SEQ ID NO: 38188 - DNA, 15 bp, Homo sapiens
ggagaagcgcttgat

SEQ ID NO: 38189 - DNA, 15 bp, Homo sapiens
gagaagcgcttgatc

SEQ ID NO: 38190 - DNA, 15 bp, Homo sapiens
agaagcgcttgatcc

SEQ ID NO: 38191 - DNA, 15 bp, Homo sapiens
gaagcgcttgatccc

SEQ ID NO: 38192 - DNA, 15 bp, Homo sapiens
aagcgcttgatccca

SEQ ID NO: 38193 - DNA, 15 bp, Homo sapiens
agcgcttgatcccag

SEQ ID NO: 38194 - DNA, 15 bp, Homo sapiens
gcgcttgatcccagg

SEQ ID NO: 38195 - DNA, 15 bp, Homo sapiens
cgcttgatcccagga

SEQ ID NO: 38196 - DNA, 15 bp, Homo sapiens
gcttgatcccaggag

SEQ ID NO: 38197 - DNA, 15 bp, Homo sapiens
cttgatcccaggagg

SEQ ID NO: 38198 - DNA, 15 bp, Homo sapiens
ttgatcccaggaggt

SEQ ID NO: 38199 - DNA, 15 bp, Homo sapiens
tgatcccaggaggtg

SEQ ID NO: 38200 - DNA, 15 bp, Homo sapiens
gatcccaggaggtgg

SEQ ID NO: 38201 - DNA, 15 bp, Homo sapiens
atcccaggaggtgga

SEQ ID NO: 38202 - DNA, 15 bp, Homo sapiens
tcccaggaggtggag

SEQ ID NO: 38203 - DNA, 15 bp, Homo sapiens
cccaggaggtggagg

SEQ ID NO: 38204 - DNA, 15 bp, Homo sapiens
ccaggaggtggaggt

SEQ ID NO: 38205 - DNA, 15 bp, Homo sapiens
caggaggtggaggtt

SEQ ID NO: 38206 - DNA, 15 bp, Homo sapiens
ggaggtggaggttgc

SEQ ID NO: 38207 - DNA, 15 bp, Homo sapiens
gaggtggaggttgca

SEQ ID NO: 38208 - DNA, 15 bp, Homo sapiens
aggtggaggttgcag

SEQ ID NO: 38209 - DNA, 15 bp, Homo sapiens
ggtggaggttgcagt

SEQ ID NO: 38210 - DNA, 15 bp, Homo sapiens
gtggaggttgcagtg

SEQ ID NO: 38211 - DNA, 15 bp, Homo sapiens
tggaggttgcagtga

SEQ ID NO: 38212 - DNA, 15 bp, Homo sapiens
ggaggttgcagtgag

SEQ ID NO: 38213 - DNA, 15 bp, Homo sapiens
aggttgcagtgagct

SEQ ID NO: 38214 - DNA, 15 bp, Homo sapiens
ggttgcagtgagctg

SEQ ID NO: 38215 - DNA, 15 bp, Homo sapiens
gttgcagtgagctga

SEQ ID NO: 38216 - DNA, 15 bp, Homo sapiens
ttgcagtgagctgag

SEQ ID NO: 38217 - DNA, 15 bp, Homo sapiens
tgcagtgagctgaga

SEQ ID NO: 38218 - DNA, 15 bp, Homo sapiens
gcagtgagctgagat

SEQ ID NO: 38219 - DNA, 15 bp, Homo sapiens
cagtgagctgagatt

SEQ ID NO: 38220 - DNA, 15 bp, Homo sapiens
agtgagctgagattg

SEQ ID NO: 38221 - DNA, 15 bp, Homo sapiens
gtgagctgagattgt

SEQ ID NO: 38222 - DNA, 15 bp, Homo sapiens
tgagctgagattgtg

SEQ ID NO: 38223 - DNA, 15 bp, Homo sapiens
gagctgagattgtgc

SEQ ID NO: 38224 - DNA, 15 bp, Homo sapiens
agctgagattgtgcc

SEQ ID NO: 38225 - DNA, 15 bp, Homo sapiens
gctgagattgtgcca

SEQ ID NO: 38226 - DNA, 15 bp, Homo sapiens
ctgagattgtgccac

SEQ ID NO: 38227 - DNA, 15 bp, Homo sapiens
tgagattgtgccact

SEQ ID NO: 38228 - DNA, 15 bp, Homo sapiens
gagattgtgccactg

SEQ ID NO: 38229 - DNA, 15 bp, Homo sapiens
agattgtgccactgc

SEQ ID NO: 38230 - DNA, 15 bp, Homo sapiens
gattgtgccactgca

SEQ ID NO: 38231 - DNA, 15 bp, Homo sapiens
attgtgccactgcac

SEQ ID NO: 38232 - DNA, 15 bp, Homo sapiens
ttgtgccactgcact

SEQ ID NO: 38233 - DNA, 15 bp, Homo sapiens
tgtgccactgcactc

SEQ ID NO: 38234 - DNA, 15 bp, Homo sapiens
gtgccactgcactcc

SEQ ID NO: 38235 - DNA, 15 bp, Homo sapiens
tgccactgcactcca

SEQ ID NO: 38236 - DNA, 15 bp, Homo sapiens
gccactgcactccag

SEQ ID NO: 38237 - DNA, 15 bp, Homo sapiens
ccactgcactccagc

SEQ ID NO: 38238 - DNA, 15 bp, Homo sapiens
cactgcactccagcc

SEQ ID NO: 38239 - DNA, 15 bp, Homo sapiens
actgcactccagcct

SEQ ID NO: 38240 - DNA, 15 bp, Homo sapiens
ctgcactccagcctg

SEQ ID NO: 38241 - DNA, 15 bp, Homo sapiens
cactccagcctgggt

SEQ ID NO: 38242 - DNA, 15 bp, Homo sapiens
actccagcctgggtg

SEQ ID NO: 38243 - DNA, 15 bp, Homo sapiens
ctccagcctgggtga

SEQ ID NO: 38244 - DNA, 15 bp, Homo sapiens
tccagcctgggtgac

SEQ ID NO: 38245 - DNA, 15 bp, Homo sapiens
ccagcctgggtgaca

SEQ ID NO: 38246 - DNA, 15 bp, Homo sapiens
cagcctgggtgacaa

SEQ ID NO: 38247 - DNA, 15 bp, Homo sapiens
agcctgggtgacaag

SEQ ID NO: 38248 - DNA, 15 bp, Homo sapiens
gcctgggtgacaaga

SEQ ID NO: 38249 - DNA, 15 bp, Homo sapiens
cctgggtgacaagag

SEQ ID NO: 38250 - DNA, 15 bp, Homo sapiens
ctgggtgacaagagt

SEQ ID NO: 38251 - DNA, 15 bp, Homo sapiens
tgggtgacaagagtg

SEQ ID NO: 38252 - DNA, 15 bp, Homo sapiens
gggtgacaagagtga

SEQ ID NO: 38253 - DNA, 15 bp, Homo sapiens
ggtgacaagagtgaa

SEQ ID NO: 38254 - DNA, 15 bp, Homo sapiens
gtgacaagagtgaaa

SEQ ID NO: 38255 - DNA, 15 bp, Homo sapiens
tgacaagagtgaaac

SEQ ID NO: 38256 - DNA, 15 bp, Homo sapiens
gacaagagtgaaact

SEQ ID NO: 38257 - DNA, 15 bp, Homo sapiens
acaagagtgaaactc

SEQ ID NO: 38258 - DNA, 15 bp, Homo sapiens
caagagtgaaactcc

SEQ ID NO: 38259 - DNA, 15 bp, Homo sapiens
aagagtgaaactcca

SEQ ID NO: 38260 - DNA, 15 bp, Homo sapiens
agagtgaaactccat

SEQ ID NO: 38261 - DNA, 15 bp, Homo sapiens
gagtgaaactccatc

SEQ ID NO: 38262 - DNA, 15 bp, Homo sapiens
agtgaaactccatct

SEQ ID NO: 38263 - DNA, 15 bp, Homo sapiens
gtgaaactccatcta

SEQ ID NO: 38264 - DNA, 15 bp, Homo sapiens
tgaaactccatctac

SEQ ID NO: 38265 - DNA, 15 bp, Homo sapiens
gaaactccatctaca

SEQ ID NO: 38266 - DNA, 15 bp, Homo sapiens
aaactccatctacaa

SEQ ID NO: 38267 - DNA, 15 bp, Homo sapiens
aactccatctacaaa

SEQ ID NO: 38268 - DNA, 15 bp, Homo sapiens
actccatctacaaaa

SEQ ID NO: 38269 - DNA, 15 bp, Homo sapiens
ctccatctacaaaaa

SEQ ID NO: 38270 - DNA, 15 bp, Homo sapiens
tccatctacaaaaaa

SEQ ID NO: 38271 - DNA, 15 bp, Homo sapiens
ccatctacaaaaaac

SEQ ID NO: 38272 - DNA, 15 bp, Homo sapiens
catctacaaaaaacc

SEQ ID NO: 38273 - DNA, 15 bp, Homo sapiens
atctacaaaaaacca

SEQ ID NO: 38274 - DNA, 15 bp, Homo sapiens
tctacaaaaaaccaa

SEQ ID NO: 38275 - DNA, 15 bp, Homo sapiens
ctacaaaaaaccaaa

SEQ ID NO: 38276 - DNA, 15 bp, Homo sapiens
tacaaaaaaccaaac

SEQ ID NO: 38277 - DNA, 15 bp, Homo sapiens
acaaaaaaccaaaca

SEQ ID NO: 38278 - DNA, 15 bp, Homo sapiens
caaaaaaccaaacaa

SEQ ID NO: 38279 - DNA, 15 bp, Homo sapiens
aaaaaaccaaacaaa

SEQ ID NO: 38280 - DNA, 15 bp, Homo sapiens
aaaaaccaaacaaaa

SEQ ID NO: 38281 - DNA, 15 bp, Homo sapiens
aaaaccaaacaaaac

SEQ ID NO: 38282 - DNA, 15 bp, Homo sapiens
aaaccaaacaaaaca

SEQ ID NO: 38283 - DNA, 15 bp, Homo sapiens
aaccaaacaaaacaa

SEQ ID NO: 38284 - DNA, 15 bp, Homo sapiens
accaaacaaaacaaa

SEQ ID NO: 38285 - DNA, 15 bp, Homo sapiens
ccaaacaaaacaaaa

SEQ ID NO: 38286 - DNA, 15 bp, Homo sapiens
caaacaaaacaaaaa

SEQ ID NO: 38287 - DNA, 15 bp, Homo sapiens
aaacaaaacaaaaac

SEQ ID NO: 38288 - DNA, 15 bp, Homo sapiens
aacaaaacaaaaaca

SEQ ID NO: 38289 - DNA, 15 bp, Homo sapiens
acaaaacaaaaacaa

SEQ ID NO: 38290 - DNA, 15 bp, Homo sapiens
caaaacaaaaacaaa

SEQ ID NO: 38291 - DNA, 15 bp, Homo sapiens
aaaacaaaaacaaac

SEQ ID NO: 38292 - DNA, 15 bp, Homo sapiens
aaacaaaaacaaaca

SEQ ID NO: 38293 - DNA, 15 bp, Homo sapiens
aacaaaaacaaacaa

SEQ ID NO: 38294 - DNA, 15 bp, Homo sapiens
acaaaaacaaacaaa

SEQ ID NO: 38295 - DNA, 15 bp, Homo sapiens
caaaaacaaacaaac

SEQ ID NO: 38296 - DNA, 15 bp, Homo sapiens
aaaaacaaacaaaca

SEQ ID NO: 38297 - DNA, 15 bp, Homo sapiens
aaaacaaacaaacaa

SEQ ID NO: 38298 - DNA, 15 bp, Homo sapiens
aaacaaacaaacaaa

SEQ ID NO: 38299 - DNA, 15 bp, Homo sapiens
aacaaacaaacaaac

SEQ ID NO: 38300 - DNA, 15 bp, Homo sapiens
acaaacaaacaaaca

SEQ ID NO: 38301 - DNA, 15 bp, Homo sapiens
caaacaaacaaacaa

SEQ ID NO: 38302 - DNA, 15 bp, Homo sapiens
aacaaacaaacaaaa

SEQ ID NO: 38303 - DNA, 15 bp, Homo sapiens
acaaacaaacaaaaa

SEQ ID NO: 38304 - DNA, 15 bp, Homo sapiens
caaacaaacaaaaaa

SEQ ID NO: 38305 - DNA, 15 bp, Homo sapiens
aaacaaacaaaaaaa

SEQ ID NO: 38306 - DNA, 15 bp, Homo sapiens
aacaaacaaaaaaaa

SEQ ID NO: 38307 - DNA, 15 bp, Homo sapiens
acaaacaaaaaaaac

SEQ ID NO: 38308 - DNA, 15 bp, Homo sapiens
caaacaaaaaaaacc

SEQ ID NO: 38309 - DNA, 15 bp, Homo sapiens
aaacaaaaaaaaccc

SEQ ID NO: 38310 - DNA, 15 bp, Homo sapiens
aacaaaaaaaaccct

SEQ ID NO: 38311 - DNA, 15 bp, Homo sapiens
acaaaaaaaacccta

SEQ ID NO: 38312 - DNA, 15 bp, Homo sapiens
caaaaaaaaccctaa

SEQ ID NO: 38313 - DNA, 15 bp, Homo sapiens
aaaaaaaaccctaag

SEQ ID NO: 38314 - DNA, 15 bp, Homo sapiens
aaaaaaaccctaaga

SEQ ID NO: 38315 - DNA, 15 bp, Homo sapiens
aaaaaaccctaagag

SEQ ID NO: 38316 - DNA, 15 bp, Homo sapiens
aaaaaccctaagagg

SEQ ID NO: 38317 - DNA, 15 bp, Homo sapiens
aaaaccctaagaggt

SEQ ID NO: 38318 - DNA, 15 bp, Homo sapiens
aaaccctaagaggtt

SEQ ID NO: 38319 - DNA, 15 bp, Homo sapiens
aaccctaagaggttg

SEQ ID NO: 38320 - DNA, 15 bp, Homo sapiens
accctaagaggttgt

SEQ ID NO: 38321 - DNA, 15 bp, Homo sapiens
ccctaagaggttgta

SEQ ID NO: 38322 - DNA, 15 bp, Homo sapiens
cctaagaggttgtat

SEQ ID NO: 38323 - DNA, 15 bp, Homo sapiens
ctaagaggttgtata

SEQ ID NO: 38324 - DNA, 15 bp, Homo sapiens
taagaggttgtatac

SEQ ID NO: 38325 - DNA, 15 bp, Homo sapiens
aagaggttgtataca

SEQ ID NO: 38326 - DNA, 15 bp, Homo sapiens
agaggttgtatacat

SEQ ID NO: 38327 - DNA, 15 bp, Homo sapiens
gaggttgtatacatt

SEQ ID NO: 38328 - DNA, 15 bp, Homo sapiens
aggttgtatacattt

SEQ ID NO: 38329 - DNA, 15 bp, Homo sapiens
ggttgtatacattta

SEQ ID NO: 38330 - DNA, 15 bp, Homo sapiens
gttgtatacatttat

SEQ ID NO: 38331 - DNA, 15 bp, Homo sapiens
ttgtatacatttata

SEQ ID NO: 38332 - DNA, 15 bp, Homo sapiens
tgtatacatttatac

SEQ ID NO: 38333 - DNA, 15 bp, Homo sapiens
gtatacatttataca

SEQ ID NO: 38334 - DNA, 15 bp, Homo sapiens
tatacatttatacaa

SEQ ID NO: 38335 - DNA, 15 bp, Homo sapiens
atacatttatacaaa

SEQ ID NO: 38336 - DNA, 15 bp, Homo sapiens
tacatttatacaaat

SEQ ID NO: 38337 - DNA, 15 bp, Homo sapiens
acatttatacaaatg

SEQ ID NO: 38338 - DNA, 15 bp, Homo sapiens
catttatacaaatgt

SEQ ID NO: 38339 - DNA, 15 bp, Homo sapiens
atttatacaaatgta

SEQ ID NO: 38340 - DNA, 15 bp, Homo sapiens
tttatacaaatgtat

SEQ ID NO: 38341 - DNA, 15 bp, Homo sapiens
ttatacaaatgtatg

SEQ ID NO: 38342 - DNA, 15 bp, Homo sapiens
tatacaaatgtatga

SEQ ID NO: 38343 - DNA, 15 bp, Homo sapiens
atacaaatgtatgaa

SEQ ID NO: 38344 - DNA, 15 bp, Homo sapiens
tacaaatgtatgaag

SEQ ID NO: 38345 - DNA, 15 bp, Homo sapiens
acaaatgtatgaagc

SEQ ID NO: 38346 - DNA, 15 bp, Homo sapiens
caaatgtatgaagca

SEQ ID NO: 38347 - DNA, 15 bp, Homo sapiens
aaatgtatgaagcac

SEQ ID NO: 38348 - DNA, 15 bp, Homo sapiens
aatgtatgaagcaca

SEQ ID NO: 38349 - DNA, 15 bp, Homo sapiens
atgtatgaagcacat

SEQ ID NO: 38350 - DNA, 15 bp, Homo sapiens
tgtatgaagcacatt

SEQ ID NO: 38351 - DNA, 15 bp, Homo sapiens
gtatgaagcacatta

SEQ ID NO: 38352 - DNA, 15 bp, Homo sapiens
tatgaagcacattag

SEQ ID NO: 38353 - DNA, 15 bp, Homo sapiens
atgaagcacattagg

SEQ ID NO: 38354 - DNA, 15 bp, Homo sapiens
tgaagcacattaggg

SEQ ID NO: 38355 - DNA, 15 bp, Homo sapiens
gaagcacattaggga

SEQ ID NO: 38356 - DNA, 15 bp, Homo sapiens
aagcacattagggaa

SEQ ID NO: 38357 - DNA, 15 bp, Homo sapiens
agcacattagggaat

SEQ ID NO: 38358 - DNA, 15 bp, Homo sapiens
gcacattagggaatt

SEQ ID NO: 38359 - DNA, 15 bp, Homo sapiens
cacattagggaattc

SEQ ID NO: 38360 - DNA, 15 bp, Homo sapiens
acattagggaattct

SEQ ID NO: 38361 - DNA, 15 bp, Homo sapiens
cattagggaattctc

SEQ ID NO: 38362 - DNA, 15 bp, Homo sapiens
attagggaattctca

SEQ ID NO: 38363 - DNA, 15 bp, Homo sapiens
ttagggaattctcac

SEQ ID NO: 38364 - DNA, 15 bp, Homo sapiens
tagggaattctcact

SEQ ID NO: 38365 - DNA, 15 bp, Homo sapiens
agggaattctcactg

SEQ ID NO: 38366 - DNA, 15 bp, Homo sapiens
gggaattctcactga

SEQ ID NO: 38367 - DNA, 15 bp, Homo sapiens
ggaattctcactgag

SEQ ID NO: 38368 - DNA, 15 bp, Homo sapiens
gaattctcactgaga

SEQ ID NO: 38369 - DNA, 15 bp, Homo sapiens
aattctcactgagaa

SEQ ID NO: 38370 - DNA, 15 bp, Homo sapiens
attctcactgagaag

SEQ ID NO: 38371 - DNA, 15 bp, Homo sapiens
ttctcactgagaagt

SEQ ID NO: 38372 - DNA, 15 bp, Homo sapiens
tctcactgagaagtg

SEQ ID NO: 38373 - DNA, 15 bp, Homo sapiens
ctcactgagaagtgt

SEQ ID NO: 38374 - DNA, 15 bp, Homo sapiens
tcactgagaagtgtg

SEQ ID NO: 38375 - DNA, 15 bp, Homo sapiens
cactgagaagtgtga

SEQ ID NO: 38376 - DNA, 15 bp, Homo sapiens
actgagaagtgtgag

SEQ ID NO: 38377 - DNA, 15 bp, Homo sapiens
ctgagaagtgtgagg

SEQ ID NO: 38378 - DNA, 15 bp, Homo sapiens
tgagaagtgtgagga

SEQ ID NO: 38379 - DNA, 15 bp, Homo sapiens
gagaagtgtgaggat

SEQ ID NO: 38380 - DNA, 15 bp, Homo sapiens
agaagtgtgaggata

SEQ ID NO: 38381 - DNA, 15 bp, Homo sapiens
gaagtgtgaggataa

SEQ ID NO: 38382 - DNA, 15 bp, Homo sapiens
aagtgtgaggataag

SEQ ID NO: 38383 - DNA, 15 bp, Homo sapiens
agtgtgaggataagt

SEQ ID NO: 38384 - DNA, 15 bp, Homo sapiens
gtgtgaggataagtg

SEQ ID NO: 38385 - DNA, 15 bp, Homo sapiens
tgtgaggataagtgt

SEQ ID NO: 38386 - DNA, 15 bp, Homo sapiens
gtgaggataagtgtt

SEQ ID NO: 38387 - DNA, 15 bp, Homo sapiens
tgaggataagtgttt

SEQ ID NO: 38388 - DNA, 15 bp, Homo sapiens
gaggataagtgtttt

SEQ ID NO: 38389 - DNA, 15 bp, Homo sapiens
aggataagtgtttta

SEQ ID NO: 38390 - DNA, 15 bp, Homo sapiens
ggataagtgttttat

SEQ ID NO: 38391 - DNA, 15 bp, Homo sapiens
gataagtgttttatg

SEQ ID NO: 38392 - DNA, 15 bp, Homo sapiens
ataagtgttttatga

SEQ ID NO: 38393 - DNA, 15 bp, Homo sapiens
taagtgttttatgaa

SEQ ID NO: 38394 - DNA, 15 bp, Homo sapiens
aagtgttttatgaat

SEQ ID NO: 38395 - DNA, 15 bp, Homo sapiens
agtgttttatgaatt

SEQ ID NO: 38396 - DNA, 15 bp, Homo sapiens
gtgttttatgaattg

SEQ ID NO: 38397 - DNA, 15 bp, Homo sapiens
tgttttatgaattga

SEQ ID NO: 38398 - DNA, 15 bp, Homo sapiens
gttttatgaattgag

SEQ ID NO: 38399 - DNA, 15 bp, Homo sapiens
ttttatgaattgaga

SEQ ID NO: 38400 - DNA, 15 bp, Homo sapiens
tttatgaattgagac

SEQ ID NO: 38401 - DNA, 15 bp, Homo sapiens
ttatgaattgagaca

SEQ ID NO: 38402 - DNA, 15 bp, Homo sapiens
tatgaattgagacat

SEQ ID NO: 38403 - DNA, 15 bp, Homo sapiens
atgaattgagacatt

SEQ ID NO: 38404 - DNA, 15 bp, Homo sapiens
tgaattgagacattt

SEQ ID NO: 38405 - DNA, 15 bp, Homo sapiens
gaattgagacatttt

SEQ ID NO: 38406 - DNA, 15 bp, Homo sapiens
aattgagacatttta

SEQ ID NO: 38407 - DNA, 15 bp, Homo sapiens
attgagacattttag

SEQ ID NO: 38408 - DNA, 15 bp, Homo sapiens
ttgagacattttaga

SEQ ID NO: 38409 - DNA, 15 bp, Homo sapiens
tgagacattttagaa

SEQ ID NO: 38410 - DNA, 15 bp, Homo sapiens
gagacattttagaag

SEQ ID NO: 38411 - DNA, 15 bp, Homo sapiens
agacattttagaaga

SEQ ID NO: 38412 - DNA, 15 bp, Homo sapiens
gacattttagaagat

SEQ ID NO: 38413 - DNA, 15 bp, Homo sapiens
acattttagaagatt

SEQ ID NO: 38414 - DNA, 15 bp, Homo sapiens
cattttagaagattc

SEQ ID NO: 38415 - DNA, 15 bp, Homo sapiens
attttagaagattca

SEQ ID NO: 38416 - DNA, 15 bp, Homo sapiens
ttttagaagattcag

SEQ ID NO: 38417 - DNA, 15 bp, Homo sapiens
tttagaagattcagg

SEQ ID NO: 38418 - DNA, 15 bp, Homo sapiens
ttagaagattcagga

SEQ ID NO: 38419 - DNA, 15 bp, Homo sapiens
tagaagattcaggaa

SEQ ID NO: 38420 - DNA, 15 bp, Homo sapiens
agaagattcaggaag

SEQ ID NO: 38421 - DNA, 15 bp, Homo sapiens
gaagattcaggaagt

SEQ ID NO: 38422 - DNA, 15 bp, Homo sapiens
aagattcaggaagtc

SEQ ID NO: 38423 - DNA, 15 bp, Homo sapiens
agattcaggaagtca

SEQ ID NO: 38424 - DNA, 15 bp, Homo sapiens
gattcaggaagtcag

SEQ ID NO: 38425 - DNA, 15 bp, Homo sapiens
attcaggaagtcagc

SEQ ID NO: 38426 - DNA, 15 bp, Homo sapiens
ttcaggaagtcagct

SEQ ID NO: 38427 - DNA, 15 bp, Homo sapiens
tcaggaagtcagcta

SEQ ID NO: 38428 - DNA, 15 bp, Homo sapiens
caggaagtcagctat

SEQ ID NO: 38429 - DNA, 15 bp, Homo sapiens
aggaagtcagctata

SEQ ID NO: 38430 - DNA, 15 bp, Homo sapiens
ggaagtcagctataa

SEQ ID NO: 38431 - DNA, 15 bp, Homo sapiens
gaagtcagctataac

SEQ ID NO: 38432 - DNA, 15 bp, Homo sapiens
aagtcagctataaca

SEQ ID NO: 38433 - DNA, 15 bp, Homo sapiens
agtcagctataacac

SEQ ID NO: 38434 - DNA, 15 bp, Homo sapiens
gtcagctataacact

SEQ ID NO: 38435 - DNA, 15 bp, Homo sapiens
tcagctataacactg

SEQ ID NO: 38436 - DNA, 15 bp, Homo sapiens
cagctataacactgt

SEQ ID NO: 38437 - DNA, 15 bp, Homo sapiens
agctataacactgtt

SEQ ID NO: 38438 - DNA, 15 bp, Homo sapiens
gctataacactgtta

SEQ ID NO: 38439 - DNA, 15 bp, Homo sapiens
ctataacactgttaa

SEQ ID NO: 38440 - DNA, 15 bp, Homo sapiens
tataacactgttaac

SEQ ID NO: 38441 - DNA, 15 bp, Homo sapiens
ataacactgttaact

SEQ ID NO: 38442 - DNA, 15 bp, Homo sapiens
taacactgttaacta

SEQ ID NO: 38443 - DNA, 15 bp, Homo sapiens
aacactgttaactat

SEQ ID NO: 38444 - DNA, 15 bp, Homo sapiens
acactgttaactatc

SEQ ID NO: 38445 - DNA, 15 bp, Homo sapiens
cactgttaactatct

SEQ ID NO: 38446 - DNA, 15 bp, Homo sapiens
actgttaactatctc

SEQ ID NO: 38447 - DNA, 15 bp, Homo sapiens
ctgttaactatctct

SEQ ID NO: 38448 - DNA, 15 bp, Homo sapiens
tgttaactatctcta

SEQ ID NO: 38449 - DNA, 15 bp, Homo sapiens
gttaactatctctac

SEQ ID NO: 38450 - DNA, 15 bp, Homo sapiens
ttaactatctctact

SEQ ID NO: 38451 - DNA, 15 bp, Homo sapiens
taactatctctactt

SEQ ID NO: 38452 - DNA, 15 bp, Homo sapiens
aactatctctacttt

SEQ ID NO: 38453 - DNA, 15 bp, Homo sapiens
actatctctactttt

SEQ ID NO: 38454 - DNA, 15 bp, Homo sapiens
ctatctctactttta

SEQ ID NO: 38455 - DNA, 15 bp, Homo sapiens
tatctctacttttat

SEQ ID NO: 38456 - DNA, 15 bp, Homo sapiens
atctctacttttatt

SEQ ID NO: 38457 - DNA, 15 bp, Homo sapiens
tctctacttttattt

SEQ ID NO: 38458 - DNA, 15 bp, Homo sapiens
ctctacttttatttt

SEQ ID NO: 38459 - DNA, 15 bp, Homo sapiens
tctacttttattttt

SEQ ID NO: 38460 - DNA, 15 bp, Homo sapiens
ctacttttatttttc

SEQ ID NO: 38461 - DNA, 15 bp, Homo sapiens
tacttttatttttcc

SEQ ID NO: 38462 - DNA, 15 bp, Homo sapiens
acttttatttttcca

SEQ ID NO: 38463 - DNA, 15 bp, Homo sapiens
cttttatttttccaa

SEQ ID NO: 38464 - DNA, 15 bp, Homo sapiens
ttttatttttccaaa

SEQ ID NO: 38465 - DNA, 15 bp, Homo sapiens
tttatttttccaaaa

SEQ ID NO: 38466 - DNA, 15 bp, Homo sapiens
ttatttttccaaaaa

SEQ ID NO: 38467 - DNA, 15 bp, Homo sapiens
tatttttccaaaaac

SEQ ID NO: 38468 - DNA, 15 bp, Homo sapiens
atttttccaaaaact

SEQ ID NO: 38469 - DNA, 15 bp, Homo sapiens
tttttccaaaaactg

SEQ ID NO: 38470 - DNA, 15 bp, Homo sapiens
ttttccaaaaactgt

SEQ ID NO: 38471 - DNA, 15 bp, Homo sapiens
tttccaaaaactgtt

SEQ ID NO: 38472 - DNA, 15 bp, Homo sapiens
ttccaaaaactgttt

SEQ ID NO: 38473 - DNA, 15 bp, Homo sapiens
tccaaaaactgtttt

SEQ ID NO: 38474 - DNA, 15 bp, Homo sapiens
ccaaaaactgttttg

SEQ ID NO: 38475 - DNA, 15 bp, Homo sapiens
caaaaactgttttgg

SEQ ID NO: 38476 - DNA, 15 bp, Homo sapiens
aaaaactgttttggt

SEQ ID NO: 38477 - DNA, 15 bp, Homo sapiens
aaaactgttttggta

SEQ ID NO: 38478 - DNA, 15 bp, Homo sapiens
aaactgttttggtat

SEQ ID NO: 38479 - DNA, 15 bp, Homo sapiens
aactgttttggtata

SEQ ID NO: 38480 - DNA, 15 bp, Homo sapiens
actgttttggtatac

SEQ ID NO: 38481 - DNA, 15 bp, Homo sapiens
ctgttttggtatact

SEQ ID NO: 38482 - DNA, 15 bp, Homo sapiens
tgttttggtatactg

SEQ ID NO: 38483 - DNA, 15 bp, Homo sapiens
gttttggtatactgt

SEQ ID NO: 38484 - DNA, 15 bp, Homo sapiens
ttttggtatactgtt

SEQ ID NO: 38485 - DNA, 15 bp, Homo sapiens
tttggtatactgttt

SEQ ID NO: 38486 - DNA, 15 bp, Homo sapiens
ttggtatactgtttt

SEQ ID NO: 38487 - DNA, 15 bp, Homo sapiens
tggtatactgttttt

SEQ ID NO: 38488 - DNA, 15 bp, Homo sapiens
ggtatactgtttttg

SEQ ID NO: 38489 - DNA, 15 bp, Homo sapiens
gtatactgtttttgt

SEQ ID NO: 38490 - DNA, 15 bp, Homo sapiens
tatactgtttttgta

SEQ ID NO: 38491 - DNA, 15 bp, Homo sapiens
atactgtttttgtac

SEQ ID NO: 38492 - DNA, 15 bp, Homo sapiens
tactgtttttgtacc

SEQ ID NO: 38493 - DNA, 15 bp, Homo sapiens
actgtttttgtaccc

SEQ ID NO: 38494 - DNA, 15 bp, Homo sapiens
ctgtttttgtacccc

SEQ ID NO: 38495 - DNA, 15 bp, Homo sapiens
tgtttttgtacccct

SEQ ID NO: 38496 - DNA, 15 bp, Homo sapiens
gtttttgtacccctg

SEQ ID NO: 38497 - DNA, 15 bp, Homo sapiens
tttttgtacccctgg

SEQ ID NO: 38498 - DNA, 15 bp, Homo sapiens
ttttgtacccctggt

SEQ ID NO: 38499 - DNA, 15 bp, Homo sapiens
tttgtacccctggta

SEQ ID NO: 38500 - DNA, 15 bp, Homo sapiens
ttgtacccctggtac

SEQ ID NO: 38501 - DNA, 15 bp, Homo sapiens
tgtacccctggtact

SEQ ID NO: 38502 - DNA, 15 bp, Homo sapiens
gtacccctggtacta

SEQ ID NO: 38503 - DNA, 15 bp, Homo sapiens
tacccctggtactac

SEQ ID NO: 38504 - DNA, 15 bp, Homo sapiens
acccctggtactaca

SEQ ID NO: 38505 - DNA, 15 bp, Homo sapiens
cccctggtactacaa

SEQ ID NO: 38506 - DNA, 15 bp, Homo sapiens
ccctggtactacaat

SEQ ID NO: 38507 - DNA, 15 bp, Homo sapiens
cctggtactacaatg

SEQ ID NO: 38508 - DNA, 15 bp, Homo sapiens
ctggtactacaatgc

SEQ ID NO: 38509 - DNA, 15 bp, Homo sapiens
tggtactacaatgcc

SEQ ID NO: 38510 - DNA, 15 bp, Homo sapiens
ggtactacaatgccc

SEQ ID NO: 38511 - DNA, 15 bp, Homo sapiens
gtactacaatgccca

SEQ ID NO: 38512 - DNA, 15 bp, Homo sapiens
tactacaatgcccag

SEQ ID NO: 38513 - DNA, 15 bp, Homo sapiens
actacaatgcccagt

SEQ ID NO: 38514 - DNA, 15 bp, Homo sapiens
ctacaatgcccagta

SEQ ID NO: 38515 - DNA, 15 bp, Homo sapiens
tacaatgcccagtat

SEQ ID NO: 38516 - DNA, 15 bp, Homo sapiens
acaatgcccagtatt

SEQ ID NO: 38517 - DNA, 15 bp, Homo sapiens
caatgcccagtattc

SEQ ID NO: 38518 - DNA, 15 bp, Homo sapiens
aatgcccagtattct

SEQ ID NO: 38519 - DNA, 15 bp, Homo sapiens
atgcccagtattcta

SEQ ID NO: 38520 - DNA, 15 bp, Homo sapiens
tgcccagtattctat

SEQ ID NO: 38521 - DNA, 15 bp, Homo sapiens
gcccagtattctatt

SEQ ID NO: 38522 - DNA, 15 bp, Homo sapiens
cccagtattctatta

SEQ ID NO: 38523 - DNA, 15 bp, Homo sapiens
ccagtattctattat

SEQ ID NO: 38524 - DNA, 15 bp, Homo sapiens
cagtattctattatt

SEQ ID NO: 38525 - DNA, 15 bp, Homo sapiens
agtattctattattg

SEQ ID NO: 38526 - DNA, 15 bp, Homo sapiens
gtattctattattgc

SEQ ID NO: 38527 - DNA, 15 bp, Homo sapiens
tattctattattgct

SEQ ID NO: 38528 - DNA, 15 bp, Homo sapiens
attctattattgctt

SEQ ID NO: 38529 - DNA, 15 bp, Homo sapiens
ttctattattgcttt

SEQ ID NO: 38530 - DNA, 15 bp, Homo sapiens
tctattattgctttg

SEQ ID NO: 38531 - DNA, 15 bp, Homo sapiens
ctattattgctttgc

SEQ ID NO: 38532 - DNA, 15 bp, Homo sapiens
tattattgctttgct

SEQ ID NO: 38533 - DNA, 15 bp, Homo sapiens
attattgctttgctt

SEQ ID NO: 38534 - DNA, 15 bp, Homo sapiens
ttattgctttgcttc

SEQ ID NO: 38535 - DNA, 15 bp, Homo sapiens
tattgctttgcttcc

SEQ ID NO: 38536 - DNA, 15 bp, Homo sapiens
attgctttgcttcct

SEQ ID NO: 38537 - DNA, 15 bp, Homo sapiens
ttgctttgcttcctt

SEQ ID NO: 38538 - DNA, 15 bp, Homo sapiens
tgctttgcttccttt

SEQ ID NO: 38539 - DNA, 15 bp, Homo sapiens
gctttgcttcctttt

SEQ ID NO: 38540 - DNA, 15 bp, Homo sapiens
ctttgcttccttttg

SEQ ID NO: 38541 - DNA, 15 bp, Homo sapiens
tttgcttccttttga

SEQ ID NO: 38542 - DNA, 15 bp, Homo sapiens
ttgcttccttttgac

SEQ ID NO: 38543 - DNA, 15 bp, Homo sapiens
tgcttccttttgact

SEQ ID NO: 38544 - DNA, 15 bp, Homo sapiens
gcttccttttgactt

SEQ ID NO: 38545 - DNA, 15 bp, Homo sapiens
cttccttttgactta

SEQ ID NO: 38546 - DNA, 15 bp, Homo sapiens
ttccttttgacttaa

SEQ ID NO: 38547 - DNA, 15 bp, Homo sapiens
tccttttgacttaag

SEQ ID NO: 38548 - DNA, 15 bp, Homo sapiens
ccttttgacttaagt

SEQ ID NO: 38549 - DNA, 15 bp, Homo sapiens
cttttgacttaagta

SEQ ID NO: 38550 - DNA, 15 bp, Homo sapiens
ttttgacttaagtag

SEQ ID NO: 38551 - DNA, 15 bp, Homo sapiens
tttgacttaagtaga

SEQ ID NO: 38552 - DNA, 15 bp, Homo sapiens
ttgacttaagtagaa

SEQ ID NO: 38553 - DNA, 15 bp, Homo sapiens
tgacttaagtagaag

SEQ ID NO: 38554 - DNA, 15 bp, Homo sapiens
gacttaagtagaagt

SEQ ID NO: 38555 - DNA, 15 bp, Homo sapiens
acttaagtagaagtt

SEQ ID NO: 38556 - DNA, 15 bp, Homo sapiens
cttaagtagaagttc

SEQ ID NO: 38557 - DNA, 15 bp, Homo sapiens
ttaagtagaagttcc

SEQ ID NO: 38558 - DNA, 15 bp, Homo sapiens
taagtagaagttcct

SEQ ID NO: 38559 - DNA, 15 bp, Homo sapiens
aagtagaagttcctg

SEQ ID NO: 38560 - DNA, 15 bp, Homo sapiens
agtagaagttcctga

SEQ ID NO: 38561 - DNA, 15 bp, Homo sapiens
gtagaagttcctgat

SEQ ID NO: 38562 - DNA, 15 bp, Homo sapiens
tagaagttcctgatt

SEQ ID NO: 38563 - DNA, 15 bp, Homo sapiens
agaagttcctgattt

SEQ ID NO: 38564 - DNA, 15 bp, Homo sapiens
gaagttcctgatttc

SEQ ID NO: 38565 - DNA, 15 bp, Homo sapiens
aagttcctgatttcg

SEQ ID NO: 38566 - DNA, 15 bp, Homo sapiens
agttcctgatttcgt

SEQ ID NO: 38567 - DNA, 15 bp, Homo sapiens
gttcctgatttcgtt

SEQ ID NO: 38568 - DNA, 15 bp, Homo sapiens
ttcctgatttcgtta

SEQ ID NO: 38569 - DNA, 15 bp, Homo sapiens
tcctgatttcgttac

SEQ ID NO: 38570 - DNA, 15 bp, Homo sapiens
cctgatttcgttaca

SEQ ID NO: 38571 - DNA, 15 bp, Homo sapiens
ctgatttcgttacac

SEQ ID NO: 38572 - DNA, 15 bp, Homo sapiens
tgatttcgttacact

SEQ ID NO: 38573 - DNA, 15 bp, Homo sapiens
gatttcgttacactc

SEQ ID NO: 38574 - DNA, 15 bp, Homo sapiens
atttcgttacactca

SEQ ID NO: 38575 - DNA, 15 bp, Homo sapiens
tttcgttacactcaa

SEQ ID NO: 38576 - DNA, 15 bp, Homo sapiens
ttcgttacactcaag

SEQ ID NO: 38577 - DNA, 15 bp, Homo sapiens
tcgttacactcaagg

SEQ ID NO: 38578 - DNA, 15 bp, Homo sapiens
cgttacactcaagga

SEQ ID NO: 38579 - DNA, 15 bp, Homo sapiens
gttacactcaaggac

SEQ ID NO: 38580 - DNA, 15 bp, Homo sapiens
ttacactcaaggact

SEQ ID NO: 38581 - DNA, 15 bp, Homo sapiens
tacactcaaggactg

SEQ ID NO: 38582 - DNA, 15 bp, Homo sapiens
acactcaaggactgg

SEQ ID NO: 38583 - DNA, 15 bp, Homo sapiens
cactcaaggactgga

SEQ ID NO: 38584 - DNA, 15 bp, Homo sapiens
actcaaggactggaa

SEQ ID NO: 38585 - DNA, 15 bp, Homo sapiens
ctcaaggactggaaa

SEQ ID NO: 38586 - DNA, 15 bp, Homo sapiens
tcaaggactggaaat

SEQ ID NO: 38587 - DNA, 15 bp, Homo sapiens
caaggactggaaatt

SEQ ID NO: 38588 - DNA, 15 bp, Homo sapiens
aaggactggaaattt

SEQ ID NO: 38589 - DNA, 15 bp, Homo sapiens
aggactggaaatttt

SEQ ID NO: 38590 - DNA, 15 bp, Homo sapiens
ggactggaaattttt

SEQ ID NO: 38591 - DNA, 15 bp, Homo sapiens
gactggaaatttttc

SEQ ID NO: 38592 - DNA, 15 bp, Homo sapiens
actggaaatttttct

SEQ ID NO: 38593 - DNA, 15 bp, Homo sapiens
ctggaaatttttctt

SEQ ID NO: 38594 - DNA, 15 bp, Homo sapiens
tggaaatttttcttt

SEQ ID NO: 38595 - DNA, 15 bp, Homo sapiens
ggaaatttttcttta

SEQ ID NO: 38596 - DNA, 15 bp, Homo sapiens
gaaatttttctttat

SEQ ID NO: 38597 - DNA, 15 bp, Homo sapiens
aaatttttctttata

SEQ ID NO: 38598 - DNA, 15 bp, Homo sapiens
aatttttctttatag

SEQ ID NO: 38599 - DNA, 15 bp, Homo sapiens
atttttctttataga

SEQ ID NO: 38600 - DNA, 15 bp, Homo sapiens
tttttctttatagag

SEQ ID NO: 38601 - DNA, 15 bp, Homo sapiens
ttttctttatagagt

SEQ ID NO: 38602 - DNA, 15 bp, Homo sapiens
tttctttatagagtt

SEQ ID NO: 38603 - DNA, 15 bp, Homo sapiens
ttctttatagagtta

SEQ ID NO: 38604 - DNA, 15 bp, Homo sapiens
tctttatagagttag

SEQ ID NO: 38605 - DNA, 15 bp, Homo sapiens
ctttatagagttagt

SEQ ID NO: 38606 - DNA, 15 bp, Homo sapiens
tttatagagttagta

SEQ ID NO: 38607 - DNA, 15 bp, Homo sapiens
ttatagagttagtat

SEQ ID NO: 38608 - DNA, 15 bp, Homo sapiens
tatagagttagtatg

SEQ ID NO: 38609 - DNA, 15 bp, Homo sapiens
atagagttagtatgg

SEQ ID NO: 38610 - DNA, 15 bp, Homo sapiens
tagagttagtatggc

SEQ ID NO: 38611 - DNA, 15 bp, Homo sapiens
agagttagtatggcc

SEQ ID NO: 38612 - DNA, 15 bp, Homo sapiens
gagttagtatggcct

SEQ ID NO: 38613 - DNA, 15 bp, Homo sapiens
agttagtatggcctt

SEQ ID NO: 38614 - DNA, 15 bp, Homo sapiens
gttagtatggccttc

SEQ ID NO: 38615 - DNA, 15 bp, Homo sapiens
ttagtatggccttct

SEQ ID NO: 38616 - DNA, 15 bp, Homo sapiens
tagtatggccttctt

SEQ ID NO: 38617 - DNA, 15 bp, Homo sapiens
agtatggccttcttc

SEQ ID NO: 38618 - DNA, 15 bp, Homo sapiens
gtatggccttcttcg

SEQ ID NO: 38619 - DNA, 15 bp, Homo sapiens
tatggccttcttcgt

SEQ ID NO: 38620 - DNA, 15 bp, Homo sapiens
atggccttcttcgtg

SEQ ID NO: 38621 - DNA, 15 bp, Homo sapiens
tggccttcttcgtgt

SEQ ID NO: 38622 - DNA, 15 bp, Homo sapiens
ggccttcttcgtgtt

SEQ ID NO: 38623 - DNA, 15 bp, Homo sapiens
gccttcttcgtgttt

SEQ ID NO: 38624 - DNA, 15 bp, Homo sapiens
ccttcttcgtgtttg

SEQ ID NO: 38625 - DNA, 15 bp, Homo sapiens
cttcttcgtgtttgc

SEQ ID NO: 38626 - DNA, 15 bp, Homo sapiens
ttcttcgtgtttgca

SEQ ID NO: 38627 - DNA, 15 bp, Homo sapiens
tcttcgtgtttgcag

SEQ ID NO: 38628 - DNA, 15 bp, Homo sapiens
cttcgtgtttgcaga

SEQ ID NO: 38629 - DNA, 15 bp, Homo sapiens
ttcgtgtttgcagat

SEQ ID NO: 38630 - DNA, 15 bp, Homo sapiens
tcgtgtttgcagata

SEQ ID NO: 38631 - DNA, 15 bp, Homo sapiens
cgtgtttgcagatag

SEQ ID NO: 38632 - DNA, 15 bp, Homo sapiens
gtgtttgcagataga

SEQ ID NO: 38633 - DNA, 15 bp, Homo sapiens
tgtttgcagatagaa

SEQ ID NO: 38634 - DNA, 15 bp, Homo sapiens
gtttgcagatagaaa

SEQ ID NO: 38635 - DNA, 15 bp, Homo sapiens
tttgcagatagaaaa

SEQ ID NO: 38636 - DNA, 15 bp, Homo sapiens
ttgcagatagaaaac

SEQ ID NO: 38637 - DNA, 15 bp, Homo sapiens
tgcagatagaaaact

SEQ ID NO: 38638 - DNA, 15 bp, Homo sapiens
gcagatagaaaacta

SEQ ID NO: 38639 - DNA, 15 bp, Homo sapiens
cagatagaaaactat

SEQ ID NO: 38640 - DNA, 15 bp, Homo sapiens
agatagaaaactatg

SEQ ID NO: 38641 - DNA, 15 bp, Homo sapiens
gatagaaaactatga

SEQ ID NO: 38642 - DNA, 15 bp, Homo sapiens
atagaaaactatgaa

SEQ ID NO: 38643 - DNA, 15 bp, Homo sapiens
tagaaaactatgaat

SEQ ID NO: 38644 - DNA, 15 bp, Homo sapiens
agaaaactatgaata

SEQ ID NO: 38645 - DNA, 15 bp, Homo sapiens
gaaaactatgaataa

SEQ ID NO: 38646 - DNA, 15 bp, Homo sapiens
aaaactatgaataaa

SEQ ID NO: 38647 - DNA, 15 bp, Homo sapiens
aaactatgaataaat

SEQ ID NO: 38648 - DNA, 15 bp, Homo sapiens
aactatgaataaatg

SEQ ID NO: 38649 - DNA, 15 bp, Homo sapiens
actatgaataaatgt

SEQ ID NO: 38650 - DNA, 15 bp, Homo sapiens
ctatgaataaatgta

SEQ ID NO: 38651 - DNA, 15 bp, Homo sapiens
tatgaataaatgtag

SEQ ID NO: 38652 - DNA, 15 bp, Homo sapiens
atgaataaatgtagt

SEQ ID NO: 38653 - DNA, 15 bp, Homo sapiens
tgaataaatgtagta

SEQ ID NO: 38654 - DNA, 15 bp, Homo sapiens
gaataaatgtagtaa

SEQ ID NO: 38655 - DNA, 15 bp, Homo sapiens
aataaatgtagtaaa

SEQ ID NO: 38656 - DNA, 15 bp, Homo sapiens
ataaatgtagtaaag

SEQ ID NO: 38657 - DNA, 15 bp, Homo sapiens
taaatgtagtaaaga

SEQ ID NO: 38658 - DNA, 15 bp, Homo sapiens
aaatgtagtaaagaa

SEQ ID NO: 38659 - DNA, 15 bp, Homo sapiens
aatgtagtaaagaaa

SEQ ID NO: 38660 - DNA, 15 bp, Homo sapiens
atgtagtaaagaaag

SEQ ID NO: 38661 - DNA, 15 bp, Homo sapiens
tgtagtaaagaaaga

SEQ ID NO: 38662 - DNA, 15 bp, Homo sapiens
gtagtaaagaaagat

SEQ ID NO: 38663 - DNA, 15 bp, Homo sapiens
tagtaaagaaagata

SEQ ID NO: 38664 - DNA, 15 bp, Homo sapiens
agtaaagaaagatat

SEQ ID NO: 38665 - DNA, 15 bp, Homo sapiens
gtaaagaaagatatt

SEQ ID NO: 38666 - DNA, 15 bp, Homo sapiens
taaagaaagatattt

SEQ ID NO: 38667 - DNA, 15 bp, Homo sapiens
aaagaaagatattta

SEQ ID NO: 38668 - DNA, 15 bp, Homo sapiens
aagaaagatatttat

SEQ ID NO: 38669 - DNA, 15 bp, Homo sapiens
agaaagatatttatt

SEQ ID NO: 38670 - DNA, 15 bp, Homo sapiens
gaaagatatttattt

SEQ ID NO: 38671 - DNA, 15 bp, Homo sapiens
aaagatatttattta

SEQ ID NO: 38672 - DNA, 15 bp, Homo sapiens
aagatatttatttat

SEQ ID NO: 38673 - DNA, 15 bp, Homo sapiens
agatatttatttatt

SEQ ID NO: 38674 - DNA, 15 bp, Homo sapiens
gatatttatttattt

SEQ ID NO: 38675 - DNA, 15 bp, Homo sapiens
atatttatttattta

SEQ ID NO: 38676 - DNA, 15 bp, Homo sapiens
tatttatttatttat

SEQ ID NO: 38677 - DNA, 15 bp, Homo sapiens
atttatttatttatt

SEQ ID NO: 38678 - DNA, 15 bp, Homo sapiens
tttatttatttattt

SEQ ID NO: 38679 - DNA, 15 bp, Homo sapiens
ttatttatttatttg

SEQ ID NO: 38680 - DNA, 15 bp, Homo sapiens
tatttatttatttga

SEQ ID NO: 38681 - DNA, 15 bp, Homo sapiens
atttatttatttgag

SEQ ID NO: 38682 - DNA, 15 bp, Homo sapiens
tttatttatttgaga

SEQ ID NO: 38683 - DNA, 15 bp, Homo sapiens
ttatttatttgagat

SEQ ID NO: 38684 - DNA, 15 bp, Homo sapiens
tatttatttgagatg

SEQ ID NO: 38685 - DNA, 15 bp, Homo sapiens
atttatttgagatgg

SEQ ID NO: 38686 - DNA, 15 bp, Homo sapiens
tttatttgagatgga

SEQ ID NO: 38687 - DNA, 15 bp, Homo sapiens
ttatttgagatggag

SEQ ID NO: 38688 - DNA, 15 bp, Homo sapiens
tatttgagatggagt

SEQ ID NO: 38689 - DNA, 15 bp, Homo sapiens
atttgagatggagtc

SEQ ID NO: 38690 - DNA, 15 bp, Homo sapiens
tttgagatggagtct

SEQ ID NO: 38691 - DNA, 15 bp, Homo sapiens
ttgagatggagtctc

SEQ ID NO: 38692 - DNA, 15 bp, Homo sapiens
tgagatggagtctca

SEQ ID NO: 38693 - DNA, 15 bp, Homo sapiens
gagatggagtctcac

SEQ ID NO: 38694 - DNA, 15 bp, Homo sapiens
agatggagtctcact

SEQ ID NO: 38695 - DNA, 15 bp, Homo sapiens
gatggagtctcactc

SEQ ID NO: 38696 - DNA, 15 bp, Homo sapiens
atggagtctcactct

SEQ ID NO: 38697 - DNA, 15 bp, Homo sapiens
tggagtctcactctg

SEQ ID NO: 38698 - DNA, 15 bp, Homo sapiens
ggagtctcactctgt

SEQ ID NO: 38699 - DNA, 15 bp, Homo sapiens
gagtctcactctgtt

SEQ ID NO: 38700 - DNA, 15 bp, Homo sapiens
agtctcactctgttg

SEQ ID NO: 38701 - DNA, 15 bp, Homo sapiens
gtctcactctgttgc

SEQ ID NO: 38702 - DNA, 15 bp, Homo sapiens
tctcactctgttgcc

SEQ ID NO: 38703 - DNA, 15 bp, Homo sapiens
ctcactctgttgccc

SEQ ID NO: 38704 - DNA, 15 bp, Homo sapiens
tcactctgttgccca

SEQ ID NO: 38705 - DNA, 15 bp, Homo sapiens
cactctgttgcccag

SEQ ID NO: 38706 - DNA, 15 bp, Homo sapiens
actctgttgcccagg

SEQ ID NO: 38707 - DNA, 15 bp, Homo sapiens
ctctgttgcccaggc

SEQ ID NO: 38708 - DNA, 15 bp, Homo sapiens
tctgttgcccaggct

SEQ ID NO: 38709 - DNA, 15 bp, Homo sapiens
ctgttgcccaggctg

SEQ ID NO: 38710 - DNA, 15 bp, Homo sapiens
tgttgcccaggctgg

SEQ ID NO: 38711 - DNA, 15 bp, Homo sapiens
gttgcccaggctgga

SEQ ID NO: 38712 - DNA, 15 bp, Homo sapiens
ttgcccaggctggag

SEQ ID NO: 38713 - DNA, 15 bp, Homo sapiens
tgcccaggctggagt

SEQ ID NO: 38714 - DNA, 15 bp, Homo sapiens
gagtgcagtggcgca

SEQ ID NO: 38715 - DNA, 15 bp, Homo sapiens
agtgcagtggcgcaa

SEQ ID NO: 38716 - DNA, 15 bp, Homo sapiens
gtgcagtggcgcaat

SEQ ID NO: 38717 - DNA, 15 bp, Homo sapiens
tgcagtggcgcaatc

SEQ ID NO: 38718 - DNA, 15 bp, Homo sapiens
gcagtggcgcaatct

SEQ ID NO: 38719 - DNA, 15 bp, Homo sapiens
cagtggcgcaatctc

SEQ ID NO: 38720 - DNA, 15 bp, Homo sapiens
agtggcgcaatctcc

SEQ ID NO: 38721 - DNA, 15 bp, Homo sapiens
gtggcgcaatctcca

SEQ ID NO: 38722 - DNA, 15 bp, Homo sapiens
tggcgcaatctccac

SEQ ID NO: 38723 - DNA, 15 bp, Homo sapiens
ggcgcaatctccact

SEQ ID NO: 38724 - DNA, 15 bp, Homo sapiens
gcgcaatctccactc

SEQ ID NO: 38725 - DNA, 15 bp, Homo sapiens
cgcaatctccactca

SEQ ID NO: 38726 - DNA, 15 bp, Homo sapiens
gcaatctccactcac

SEQ ID NO: 38727 - DNA, 15 bp, Homo sapiens
caatctccactcact

SEQ ID NO: 38728 - DNA, 15 bp, Homo sapiens
aatctccactcactg

SEQ ID NO: 38729 - DNA, 15 bp, Homo sapiens
atctccactcactgc

SEQ ID NO: 38730 - DNA, 15 bp, Homo sapiens
tctccactcactgca

SEQ ID NO: 38731 - DNA, 15 bp, Homo sapiens
ctccactcactgcaa

SEQ ID NO: 38732 - DNA, 15 bp, Homo sapiens
tccactcactgcaac

SEQ ID NO: 38733 - DNA, 15 bp, Homo sapiens
ccactcactgcaacc

SEQ ID NO: 38734 - DNA, 15 bp, Homo sapiens
cactcactgcaacct

SEQ ID NO: 38735 - DNA, 15 bp, Homo sapiens
actcactgcaacctc

SEQ ID NO: 38736 - DNA, 15 bp, Homo sapiens
aacctctgcctccca

SEQ ID NO: 38737 - DNA, 15 bp, Homo sapiens
acctctgcctcccag

SEQ ID NO: 38738 - DNA, 15 bp, Homo sapiens
cctctgcctcccagg

SEQ ID NO: 38739 - DNA, 15 bp, Homo sapiens
ctctgcctcccaggt

SEQ ID NO: 38740 - DNA, 15 bp, Homo sapiens
tctgcctcccaggtt

SEQ ID NO: 38741 - DNA, 15 bp, Homo sapiens
ctgcctcccaggttc

SEQ ID NO: 38742 - DNA, 15 bp, Homo sapiens
tgcctcccaggttca

SEQ ID NO: 38743 - DNA, 15 bp, Homo sapiens
gcctcccaggttcaa

SEQ ID NO: 38744 - DNA, 15 bp, Homo sapiens
cctcccaggttcaag

SEQ ID NO: 38745 - DNA, 15 bp, Homo sapiens
ctcccaggttcaagc

SEQ ID NO: 38746 - DNA, 15 bp, Homo sapiens
tcccaggttcaagca

SEQ ID NO: 38747 - DNA, 15 bp, Homo sapiens
cccaggttcaagcaa

SEQ ID NO: 38748 - DNA, 15 bp, Homo sapiens
ccaggttcaagcaag

SEQ ID NO: 38749 - DNA, 15 bp, Homo sapiens
caggttcaagcaagt

SEQ ID NO: 38750 - DNA, 15 bp, Homo sapiens
aggttcaagcaagtc

SEQ ID NO: 38751 - DNA, 15 bp, Homo sapiens
ggttcaagcaagtct

SEQ ID NO: 38752 - DNA, 15 bp, Homo sapiens
gttcaagcaagtctc

SEQ ID NO: 38753 - DNA, 15 bp, Homo sapiens
ttcaagcaagtctcc

SEQ ID NO: 38754 - DNA, 15 bp, Homo sapiens
tcaagcaagtctcct

SEQ ID NO: 38755 - DNA, 15 bp, Homo sapiens
caagcaagtctcctg

SEQ ID NO: 38756 - DNA, 15 bp, Homo sapiens
aagcaagtctcctgc

SEQ ID NO: 38757 - DNA, 15 bp, Homo sapiens
agcaagtctcctgcc

SEQ ID NO: 38758 - DNA, 15 bp, Homo sapiens
gcaagtctcctgcct

SEQ ID NO: 38759 - DNA, 15 bp, Homo sapiens
caagtctcctgcctc

SEQ ID NO: 38760 - DNA, 15 bp, Homo sapiens
aagtctcctgcctca

SEQ ID NO: 38761 - DNA, 15 bp, Homo sapiens
agtctcctgcctcag

SEQ ID NO: 38762 - DNA, 15 bp, Homo sapiens
gtctcctgcctcagc

SEQ ID NO: 38763 - DNA, 15 bp, Homo sapiens
ctcctgagtagctgg

SEQ ID NO: 38764 - DNA, 15 bp, Homo sapiens
tcctgagtagctggg

SEQ ID NO: 38765 - DNA, 15 bp, Homo sapiens
cctgagtagctggga

SEQ ID NO: 38766 - DNA, 15 bp, Homo sapiens
ctgagtagctgggat

SEQ ID NO: 38767 - DNA, 15 bp, Homo sapiens
tgagtagctgggatt

SEQ ID NO: 38768 - DNA, 15 bp, Homo sapiens
gagtagctgggatta

SEQ ID NO: 38769 - DNA, 15 bp, Homo sapiens
gctgggattacagga

SEQ ID NO: 38770 - DNA, 15 bp, Homo sapiens
ctgggattacaggag

SEQ ID NO: 38771 - DNA, 15 bp, Homo sapiens
tgggattacaggagt

SEQ ID NO: 38772 - DNA, 15 bp, Homo sapiens
gggattacaggagtc

SEQ ID NO: 38773 - DNA, 15 bp, Homo sapiens
ggattacaggagtcc

SEQ ID NO: 38774 - DNA, 15 bp, Homo sapiens
gattacaggagtcca

SEQ ID NO: 38775 - DNA, 15 bp, Homo sapiens
attacaggagtccac

SEQ ID NO: 38776 - DNA, 15 bp, Homo sapiens
ttacaggagtccacc

SEQ ID NO: 38777 - DNA, 15 bp, Homo sapiens
tacaggagtccacca

SEQ ID NO: 38778 - DNA, 15 bp, Homo sapiens
acaggagtccaccac

SEQ ID NO: 38779 - DNA, 15 bp, Homo sapiens
caggagtccaccacc

SEQ ID NO: 38780 - DNA, 15 bp, Homo sapiens
aggagtccaccacca

SEQ ID NO: 38781 - DNA, 15 bp, Homo sapiens
ggagtccaccaccat

SEQ ID NO: 38782 - DNA, 15 bp, Homo sapiens
gagtccaccaccatg

SEQ ID NO: 38783 - DNA, 15 bp, Homo sapiens
agtccaccaccatgc

SEQ ID NO: 38784 - DNA, 15 bp, Homo sapiens
gtccaccaccatgct

SEQ ID NO: 38785 - DNA, 15 bp, Homo sapiens
tccaccaccatgctc

SEQ ID NO: 38786 - DNA, 15 bp, Homo sapiens
ccaccaccatgctcg

SEQ ID NO: 38787 - DNA, 15 bp, Homo sapiens
caccaccatgctcgg

SEQ ID NO: 38788 - DNA, 15 bp, Homo sapiens
accaccatgctcggc

SEQ ID NO: 38789 - DNA, 15 bp, Homo sapiens
ccaccatgctcggct

SEQ ID NO: 38790 - DNA, 15 bp, Homo sapiens
caccatgctcggcta

SEQ ID NO: 38791 - DNA, 15 bp, Homo sapiens
accatgctcggctaa

SEQ ID NO: 38792 - DNA, 15 bp, Homo sapiens
ccatgctcggctaat

SEQ ID NO: 38793 - DNA, 15 bp, Homo sapiens
catgctcggctaatt

SEQ ID NO: 38794 - DNA, 15 bp, Homo sapiens
atgctcggctaattt

SEQ ID NO: 38795 - DNA, 15 bp, Homo sapiens
tgctcggctaatttt

SEQ ID NO: 38796 - DNA, 15 bp, Homo sapiens
gctcggctaattttt

SEQ ID NO: 38797 - DNA, 15 bp, Homo sapiens
ctcggctaatttttg

SEQ ID NO: 38798 - DNA, 15 bp, Homo sapiens
tcggctaatttttgt

SEQ ID NO: 38799 - DNA, 15 bp, Homo sapiens
cggctaatttttgta

SEQ ID NO: 38800 - DNA, 15 bp, Homo sapiens
atttttgtattttta

SEQ ID NO: 38801 - DNA, 15 bp, Homo sapiens
tttttgtatttttag

SEQ ID NO: 38802 - DNA, 15 bp, Homo sapiens
ttttgtatttttagt

SEQ ID NO: 38803 - DNA, 15 bp, Homo sapiens
tttgtatttttagta

SEQ ID NO: 38804 - DNA, 15 bp, Homo sapiens
ttgtatttttagtag

SEQ ID NO: 38805 - DNA, 15 bp, Homo sapiens
tgtatttttagtaga

SEQ ID NO: 38806 - DNA, 15 bp, Homo sapiens
gtatttttagtagag

SEQ ID NO: 38807 - DNA, 15 bp, Homo sapiens
tatttttagtagaga

SEQ ID NO: 38808 - DNA, 15 bp, Homo sapiens
atttttagtagagac

SEQ ID NO: 38809 - DNA, 15 bp, Homo sapiens
tttttagtagagaca

SEQ ID NO: 38810 - DNA, 15 bp, Homo sapiens
ttttagtagagacag

SEQ ID NO: 38811 - DNA, 15 bp, Homo sapiens
tttagtagagacagg

SEQ ID NO: 38812 - DNA, 15 bp, Homo sapiens
ttagtagagacaggg

SEQ ID NO: 38813 - DNA, 15 bp, Homo sapiens
tagtagagacagggt

SEQ ID NO: 38814 - DNA, 15 bp, Homo sapiens
agtagagacagggtt

SEQ ID NO: 38815 - DNA, 15 bp, Homo sapiens
gtagagacagggttt

SEQ ID NO: 38816 - DNA, 15 bp, Homo sapiens
tagagacagggtttc

SEQ ID NO: 38817 - DNA, 15 bp, Homo sapiens
agagacagggtttca

SEQ ID NO: 38818 - DNA, 15 bp, Homo sapiens
gagacagggtttcac

SEQ ID NO: 38819 - DNA, 15 bp, Homo sapiens
agacagggtttcacc

SEQ ID NO: 38820 - DNA, 15 bp, Homo sapiens
gacagggtttcaccc

SEQ ID NO: 38821 - DNA, 15 bp, Homo sapiens
acagggtttcaccct

SEQ ID NO: 38822 - DNA, 15 bp, Homo sapiens
cagggtttcaccctg

SEQ ID NO: 38823 - DNA, 15 bp, Homo sapiens
agggtttcaccctgt

SEQ ID NO: 38824 - DNA, 15 bp, Homo sapiens
gggtttcaccctgtt

SEQ ID NO: 38825 - DNA, 15 bp, Homo sapiens
ggtttcaccctgttg

SEQ ID NO: 38826 - DNA, 15 bp, Homo sapiens
gtttcaccctgttgg

SEQ ID NO: 38827 - DNA, 15 bp, Homo sapiens
tttcaccctgttggt

SEQ ID NO: 38828 - DNA, 15 bp, Homo sapiens
ttcaccctgttggtc

SEQ ID NO: 38829 - DNA, 15 bp, Homo sapiens
tcaccctgttggtca

SEQ ID NO: 38830 - DNA, 15 bp, Homo sapiens
caccctgttggtcag

SEQ ID NO: 38831 - DNA, 15 bp, Homo sapiens
accctgttggtcagg

SEQ ID NO: 38832 - DNA, 15 bp, Homo sapiens
ccctgttggtcaggc

SEQ ID NO: 38833 - DNA, 15 bp, Homo sapiens
cctgttggtcaggct

SEQ ID NO: 38834 - DNA, 15 bp, Homo sapiens
ctgttggtcaggctg

SEQ ID NO: 38835 - DNA, 15 bp, Homo sapiens
tgttggtcaggctgg

SEQ ID NO: 38836 - DNA, 15 bp, Homo sapiens
gttggtcaggctggc

SEQ ID NO: 38837 - DNA, 15 bp, Homo sapiens
ttggtcaggctggcc

SEQ ID NO: 38838 - DNA, 15 bp, Homo sapiens
tggtcaggctggcct

SEQ ID NO: 38839 - DNA, 15 bp, Homo sapiens
ggtcaggctggcctc

SEQ ID NO: 38840 - DNA, 15 bp, Homo sapiens
gtcaggctggcctca

SEQ ID NO: 38841 - DNA, 15 bp, Homo sapiens
tcaggctggcctcaa

SEQ ID NO: 38842 - DNA, 15 bp, Homo sapiens
caggctggcctcaaa

SEQ ID NO: 38843 - DNA, 15 bp, Homo sapiens
aggctggcctcaaac

SEQ ID NO: 38844 - DNA, 15 bp, Homo sapiens
ggctggcctcaaact

SEQ ID NO: 38845 - DNA, 15 bp, Homo sapiens
gctggcctcaaactc

SEQ ID NO: 38846 - DNA, 15 bp, Homo sapiens
ctggcctcaaactcc

SEQ ID NO: 38847 - DNA, 15 bp, Homo sapiens
tggcctcaaactcct

SEQ ID NO: 38848 - DNA, 15 bp, Homo sapiens
ggcctcaaactcctg

SEQ ID NO: 38849 - DNA, 15 bp, Homo sapiens
gcctcaaactcctga

SEQ ID NO: 38850 - DNA, 15 bp, Homo sapiens
cctcaaactcctgac

SEQ ID NO: 38851 - DNA, 15 bp, Homo sapiens
ctcaaactcctgact

SEQ ID NO: 38852 - DNA, 15 bp, Homo sapiens
tcaaactcctgactt

SEQ ID NO: 38853 - DNA, 15 bp, Homo sapiens
caaactcctgacttc

SEQ ID NO: 38854 - DNA, 15 bp, Homo sapiens
aaactcctgacttca

SEQ ID NO: 38855 - DNA, 15 bp, Homo sapiens
aactcctgacttcat

SEQ ID NO: 38856 - DNA, 15 bp, Homo sapiens
actcctgacttcatg

SEQ ID NO: 38857 - DNA, 15 bp, Homo sapiens
ctcctgacttcatga

SEQ ID NO: 38858 - DNA, 15 bp, Homo sapiens
tcctgacttcatgat

SEQ ID NO: 38859 - DNA, 15 bp, Homo sapiens
cctgacttcatgatc

SEQ ID NO: 38860 - DNA, 15 bp, Homo sapiens
ctgacttcatgatcc

SEQ ID NO: 38861 - DNA, 15 bp, Homo sapiens
tgacttcatgatcca

SEQ ID NO: 38862 - DNA, 15 bp, Homo sapiens
gacttcatgatccac

SEQ ID NO: 38863 - DNA, 15 bp, Homo sapiens
acttcatgatccacc

SEQ ID NO: 38864 - DNA, 15 bp, Homo sapiens
cttcatgatccaccc

SEQ ID NO: 38865 - DNA, 15 bp, Homo sapiens
ttcatgatccaccca

SEQ ID NO: 38866 - DNA, 15 bp, Homo sapiens
tcatgatccacccac

SEQ ID NO: 38867 - DNA, 15 bp, Homo sapiens
catgatccacccacc

SEQ ID NO: 38868 - DNA, 15 bp, Homo sapiens
atgatccacccacct

SEQ ID NO: 38869 - DNA, 15 bp, Homo sapiens
tgatccacccacctc

SEQ ID NO: 38870 - DNA, 15 bp, Homo sapiens
gatccacccacctca

SEQ ID NO: 38871 - DNA, 15 bp, Homo sapiens
atccacccacctcag

SEQ ID NO: 38872 - DNA, 15 bp, Homo sapiens
tccacccacctcagc

SEQ ID NO: 38873 - DNA, 15 bp, Homo sapiens
ccacccacctcagct

SEQ ID NO: 38874 - DNA, 15 bp, Homo sapiens
cacccacctcagctt

SEQ ID NO: 38875 - DNA, 15 bp, Homo sapiens
acccacctcagcttc

SEQ ID NO: 38876 - DNA, 15 bp, Homo sapiens
cccacctcagcttcc

SEQ ID NO: 38877 - DNA, 15 bp, Homo sapiens
ccacctcagcttccc

SEQ ID NO: 38878 - DNA, 15 bp, Homo sapiens
cacctcagcttccca

SEQ ID NO: 38879 - DNA, 15 bp, Homo sapiens
acctcagcttcccaa

SEQ ID NO: 38880 - DNA, 15 bp, Homo sapiens
cctcagcttcccaag

SEQ ID NO: 38881 - DNA, 15 bp, Homo sapiens
ctcagcttcccaagg

SEQ ID NO: 38882 - DNA, 15 bp, Homo sapiens
tcagcttcccaaggt

SEQ ID NO: 38883 - DNA, 15 bp, Homo sapiens
cagcttcccaaggtg

SEQ ID NO: 38884 - DNA, 15 bp, Homo sapiens
agcttcccaaggtgc

SEQ ID NO: 38885 - DNA, 15 bp, Homo sapiens
gcttcccaaggtgct

SEQ ID NO: 38886 - DNA, 15 bp, Homo sapiens
cttcccaaggtgctg

SEQ ID NO: 38887 - DNA, 15 bp, Homo sapiens
ttcccaaggtgctgg

SEQ ID NO: 38888 - DNA, 15 bp, Homo sapiens
tcccaaggtgctggg

SEQ ID NO: 38889 - DNA, 15 bp, Homo sapiens
cccaaggtgctggga

SEQ ID NO: 38890 - DNA, 15 bp, Homo sapiens
ccaaggtgctgggat

SEQ ID NO: 38891 - DNA, 15 bp, Homo sapiens
caaggtgctgggatt

SEQ ID NO: 38892 - DNA, 15 bp, Homo sapiens
aaggtgctgggatta

SEQ ID NO: 38893 - DNA, 15 bp, Homo sapiens
aggtgctgggattac

SEQ ID NO: 38894 - DNA, 15 bp, Homo sapiens
ggtgctgggattaca

SEQ ID NO: 38895 - DNA, 15 bp, Homo sapiens
ctgggattacaggct

SEQ ID NO: 38896 - DNA, 15 bp, Homo sapiens
tgggattacaggctt

SEQ ID NO: 38897 - DNA, 15 bp, Homo sapiens
gggattacaggcttg

SEQ ID NO: 38898 - DNA, 15 bp, Homo sapiens
ggattacaggcttgg

SEQ ID NO: 38899 - DNA, 15 bp, Homo sapiens
gattacaggcttggg

SEQ ID NO: 38900 - DNA, 15 bp, Homo sapiens
attacaggcttgggc

SEQ ID NO: 38901 - DNA, 15 bp, Homo sapiens
ttacaggcttgggcc

SEQ ID NO: 38902 - DNA, 15 bp, Homo sapiens
tacaggcttgggcca

SEQ ID NO: 38903 - DNA, 15 bp, Homo sapiens
acaggcttgggccat

SEQ ID NO: 38904 - DNA, 15 bp, Homo sapiens
caggcttgggccatc

SEQ ID NO: 38905 - DNA, 15 bp, Homo sapiens
aggcttgggccatca

SEQ ID NO: 38906 - DNA, 15 bp, Homo sapiens
ggcttgggccatcac

SEQ ID NO: 38907 - DNA, 15 bp, Homo sapiens
gcttgggccatcaca

SEQ ID NO: 38908 - DNA, 15 bp, Homo sapiens
cttgggccatcacac

SEQ ID NO: 38909 - DNA, 15 bp, Homo sapiens
ttgggccatcacacc

SEQ ID NO: 38910 - DNA, 15 bp, Homo sapiens
tgggccatcacacct

SEQ ID NO: 38911 - DNA, 15 bp, Homo sapiens
gggccatcacacctg

SEQ ID NO: 38912 - DNA, 15 bp, Homo sapiens
ggccatcacacctgg

SEQ ID NO: 38913 - DNA, 15 bp, Homo sapiens
gccatcacacctggc

SEQ ID NO: 38914 - DNA, 15 bp, Homo sapiens
ccatcacacctggca

SEQ ID NO: 38915 - DNA, 15 bp, Homo sapiens
catcacacctggcag

SEQ ID NO: 38916 - DNA, 15 bp, Homo sapiens
atcacacctggcaga

SEQ ID NO: 38917 - DNA, 15 bp, Homo sapiens
tcacacctggcagaa

SEQ ID NO: 38918 - DNA, 15 bp, Homo sapiens
cacacctggcagaaa

SEQ ID NO: 38919 - DNA, 15 bp, Homo sapiens
acacctggcagaaag

SEQ ID NO: 38920 - DNA, 15 bp, Homo sapiens
cacctggcagaaaga

SEQ ID NO: 38921 - DNA, 15 bp, Homo sapiens
acctggcagaaagat

SEQ ID NO: 38922 - DNA, 15 bp, Homo sapiens
cctggcagaaagatt

SEQ ID NO: 38923 - DNA, 15 bp, Homo sapiens
ctggcagaaagatta

SEQ ID NO: 38924 - DNA, 15 bp, Homo sapiens
tggcagaaagattat

SEQ ID NO: 38925 - DNA, 15 bp, Homo sapiens
ggcagaaagattatt

SEQ ID NO: 38926 - DNA, 15 bp, Homo sapiens
gcagaaagattattt

SEQ ID NO: 38927 - DNA, 15 bp, Homo sapiens
cagaaagattattta

SEQ ID NO: 38928 - DNA, 15 bp, Homo sapiens
agaaagattatttat

SEQ ID NO: 38929 - DNA, 15 bp, Homo sapiens
gaaagattatttatt

SEQ ID NO: 38930 - DNA, 15 bp, Homo sapiens
aaagattatttattt

SEQ ID NO: 38931 - DNA, 15 bp, Homo sapiens
aagattatttattta

SEQ ID NO: 38932 - DNA, 15 bp, Homo sapiens
agattatttatttat

SEQ ID NO: 38933 - DNA, 15 bp, Homo sapiens
gattatttatttatt

SEQ ID NO: 38934 - DNA, 15 bp, Homo sapiens
attatttatttattt

SEQ ID NO: 38935 - DNA, 15 bp, Homo sapiens
ttatttatttattta

SEQ ID NO: 38936 - DNA, 15 bp, Homo sapiens
tgagatggagtctcc

SEQ ID NO: 38937 - DNA, 15 bp, Homo sapiens
gagatggagtctccc

SEQ ID NO: 38938 - DNA, 15 bp, Homo sapiens
agatggagtctccct

SEQ ID NO: 38939 - DNA, 15 bp, Homo sapiens
gatggagtctccctc

SEQ ID NO: 38940 - DNA, 15 bp, Homo sapiens
atggagtctccctct

SEQ ID NO: 38941 - DNA, 15 bp, Homo sapiens
tggagtctccctctg

SEQ ID NO: 38942 - DNA, 15 bp, Homo sapiens
ggagtctccctctgt

SEQ ID NO: 38943 - DNA, 15 bp, Homo sapiens
gagtctccctctgtt

SEQ ID NO: 38944 - DNA, 15 bp, Homo sapiens
agtctccctctgttg

SEQ ID NO: 38945 - DNA, 15 bp, Homo sapiens
gtctccctctgttgc

SEQ ID NO: 38946 - DNA, 15 bp, Homo sapiens
tctccctctgttgct

SEQ ID NO: 38947 - DNA, 15 bp, Homo sapiens
ctccctctgttgctg

SEQ ID NO: 38948 - DNA, 15 bp, Homo sapiens
tccctctgttgctga

SEQ ID NO: 38949 - DNA, 15 bp, Homo sapiens
ccctctgttgctgag

SEQ ID NO: 38950 - DNA, 15 bp, Homo sapiens
cctctgttgctgagg

SEQ ID NO: 38951 - DNA, 15 bp, Homo sapiens
ctctgttgctgaggc

SEQ ID NO: 38952 - DNA, 15 bp, Homo sapiens
tctgttgctgaggct

SEQ ID NO: 38953 - DNA, 15 bp, Homo sapiens
ctgttgctgaggctg

SEQ ID NO: 38954 - DNA, 15 bp, Homo sapiens
tgttgctgaggctgg

SEQ ID NO: 38955 - DNA, 15 bp, Homo sapiens
gttgctgaggctggg

SEQ ID NO: 38956 - DNA, 15 bp, Homo sapiens
ttgctgaggctgggg

SEQ ID NO: 38957 - DNA, 15 bp, Homo sapiens
tgctgaggctggggt

SEQ ID NO: 38958 - DNA, 15 bp, Homo sapiens
gctgaggctggggtg

SEQ ID NO: 38959 - DNA, 15 bp, Homo sapiens
ctgaggctggggtgc

SEQ ID NO: 38960 - DNA, 15 bp, Homo sapiens
tgaggctggggtgca

SEQ ID NO: 38961 - DNA, 15 bp, Homo sapiens
gaggctggggtgcag

SEQ ID NO: 38962 - DNA, 15 bp, Homo sapiens
aggctggggtgcagt

SEQ ID NO: 38963 - DNA, 15 bp, Homo sapiens
ggctggggtgcagtg

SEQ ID NO: 38964 - DNA, 15 bp, Homo sapiens
gctggggtgcagtgg

SEQ ID NO: 38965 - DNA, 15 bp, Homo sapiens
ctggggtgcagtggt

SEQ ID NO: 38966 - DNA, 15 bp, Homo sapiens
tggggtgcagtggta

SEQ ID NO: 38967 - DNA, 15 bp, Homo sapiens
ggggtgcagtggtac

SEQ ID NO: 38968 - DNA, 15 bp, Homo sapiens
gggtgcagtggtacg

SEQ ID NO: 38969 - DNA, 15 bp, Homo sapiens
ggtgcagtggtacga

SEQ ID NO: 38970 - DNA, 15 bp, Homo sapiens
gtgcagtggtacgat

SEQ ID NO: 38971 - DNA, 15 bp, Homo sapiens
tgcagtggtacgatc

SEQ ID NO: 38972 - DNA, 15 bp, Homo sapiens
gcagtggtacgatct

SEQ ID NO: 38973 - DNA, 15 bp, Homo sapiens
cagtggtacgatctt

SEQ ID NO: 38974 - DNA, 15 bp, Homo sapiens
agtggtacgatcttg

SEQ ID NO: 38975 - DNA, 15 bp, Homo sapiens
gtggtacgatcttgg

SEQ ID NO: 38976 - DNA, 15 bp, Homo sapiens
tggtacgatcttggc

SEQ ID NO: 38977 - DNA, 15 bp, Homo sapiens
ggtacgatcttggct

SEQ ID NO: 38978 - DNA, 15 bp, Homo sapiens
gtacgatcttggctc

SEQ ID NO: 38979 - DNA, 15 bp, Homo sapiens
tacgatcttggctca

SEQ ID NO: 38980 - DNA, 15 bp, Homo sapiens
acgatcttggctcac

SEQ ID NO: 38981 - DNA, 15 bp, Homo sapiens
cgatcttggctcact

SEQ ID NO: 38982 - DNA, 15 bp, Homo sapiens
ttggctcactgcaac

SEQ ID NO: 38983 - DNA, 15 bp, Homo sapiens
tggctcactgcaacc

SEQ ID NO: 38984 - DNA, 15 bp, Homo sapiens
caacctctgcctcca

SEQ ID NO: 38985 - DNA, 15 bp, Homo sapiens
aacctctgcctccag

SEQ ID NO: 38986 - DNA, 15 bp, Homo sapiens
acctctgcctccagg

SEQ ID NO: 38987 - DNA, 15 bp, Homo sapiens
cctctgcctccaggg

SEQ ID NO: 38988 - DNA, 15 bp, Homo sapiens
ctctgcctccagggt

SEQ ID NO: 38989 - DNA, 15 bp, Homo sapiens
tctgcctccagggtt

SEQ ID NO: 38990 - DNA, 15 bp, Homo sapiens
ctgcctccagggttc

SEQ ID NO: 38991 - DNA, 15 bp, Homo sapiens
tgcctccagggttca

SEQ ID NO: 38992 - DNA, 15 bp, Homo sapiens
gcctccagggttcaa

SEQ ID NO: 38993 - DNA, 15 bp, Homo sapiens
cctccagggttcaag

SEQ ID NO: 38994 - DNA, 15 bp, Homo sapiens
ctccagggttcaagt

SEQ ID NO: 38995 - DNA, 15 bp, Homo sapiens
tccagggttcaagtg

SEQ ID NO: 38996 - DNA, 15 bp, Homo sapiens
ccagggttcaagtga

SEQ ID NO: 38997 - DNA, 15 bp, Homo sapiens
cagggttcaagtgat

SEQ ID NO: 38998 - DNA, 15 bp, Homo sapiens
agggttcaagtgatt

SEQ ID NO: 38999 - DNA, 15 bp, Homo sapiens
gggttcaagtgattc

SEQ ID NO: 39000 - DNA, 15 bp, Homo sapiens
ggttcaagtgattct

SEQ ID NO: 39001 - DNA, 15 bp, Homo sapiens
gttcaagtgattctc

SEQ ID NO: 39002 - DNA, 15 bp, Homo sapiens
ttcaagtgattctcg

SEQ ID NO: 39003 - DNA, 15 bp, Homo sapiens
tcaagtgattctcgt

SEQ ID NO: 39004 - DNA, 15 bp, Homo sapiens
caagtgattctcgtg

SEQ ID NO: 39005 - DNA, 15 bp, Homo sapiens
aagtgattctcgtgc

SEQ ID NO: 39006 - DNA, 15 bp, Homo sapiens
agtgattctcgtgcc

SEQ ID NO: 39007 - DNA, 15 bp, Homo sapiens
gtgattctcgtgcct

SEQ ID NO: 39008 - DNA, 15 bp, Homo sapiens
tgattctcgtgcctc

SEQ ID NO: 39009 - DNA, 15 bp, Homo sapiens
gattctcgtgcctca

SEQ ID NO: 39010 - DNA, 15 bp, Homo sapiens
attctcgtgcctcag

SEQ ID NO: 39011 - DNA, 15 bp, Homo sapiens
gaacgaacacaacag

SEQ ID NO: 39012 - DNA, 15 bp, Homo sapiens
aacgaacacaacaga

SEQ ID NO: 39013 - DNA, 15 bp, Homo sapiens
acgaacacaacagag

SEQ ID NO: 39014 - DNA, 15 bp, Homo sapiens
cgaacacaacagaga

SEQ ID NO: 39015 - DNA, 15 bp, Homo sapiens
gaacacaacagagag

SEQ ID NO: 39016 - DNA, 15 bp, Homo sapiens
aacacaacagagaga

SEQ ID NO: 39017 - DNA, 15 bp, Homo sapiens
acacaacagagagag

SEQ ID NO: 39018 - DNA, 15 bp, Homo sapiens
cacaacagagagaga

SEQ ID NO: 39019 - DNA, 15 bp, Homo sapiens
acaacagagagagat

SEQ ID NO: 39020 - DNA, 15 bp, Homo sapiens
caacagagagagatt

SEQ ID NO: 39021 - DNA, 15 bp, Homo sapiens
aacagagagagattt

SEQ ID NO: 39022 - DNA, 15 bp, Homo sapiens
acagagagagatttt

SEQ ID NO: 39023 - DNA, 15 bp, Homo sapiens
cagagagagatttta

SEQ ID NO: 39024 - DNA, 15 bp, Homo sapiens
agagagagattttaa

SEQ ID NO: 39025 - DNA, 15 bp, Homo sapiens
gagagagattttaac

SEQ ID NO: 39026 - DNA, 15 bp, Homo sapiens
agagagattttaaca

SEQ ID NO: 39027 - DNA, 15 bp, Homo sapiens
gagagattttaacaa

SEQ ID NO: 39028 - DNA, 15 bp, Homo sapiens
agagattttaacaaa

SEQ ID NO: 39029 - DNA, 15 bp, Homo sapiens
gagattttaacaaaa

SEQ ID NO: 39030 - DNA, 15 bp, Homo sapiens
agattttaacaaaat

SEQ ID NO: 39031 - DNA, 15 bp, Homo sapiens
gattttaacaaaata

SEQ ID NO: 39032 - DNA, 15 bp, Homo sapiens
attttaacaaaataa

SEQ ID NO: 39033 - DNA, 15 bp, Homo sapiens
ttttaacaaaataaa

SEQ ID NO: 39034 - DNA, 15 bp, Homo sapiens
tttaacaaaataaat

SEQ ID NO: 39035 - DNA, 15 bp, Homo sapiens
ttaacaaaataaatc

SEQ ID NO: 39036 - DNA, 15 bp, Homo sapiens
taacaaaataaatct

SEQ ID NO: 39037 - DNA, 15 bp, Homo sapiens
aacaaaataaatctt

SEQ ID NO: 39038 - DNA, 15 bp, Homo sapiens
acaaaataaatctta

SEQ ID NO: 39039 - DNA, 15 bp, Homo sapiens
caaaataaatcttag

SEQ ID NO: 39040 - DNA, 15 bp, Homo sapiens
aaaataaatcttagg

SEQ ID NO: 39041 - DNA, 15 bp, Homo sapiens
aaataaatcttaggt

SEQ ID NO: 39042 - DNA, 15 bp, Homo sapiens
aataaatcttaggtc

SEQ ID NO: 39043 - DNA, 15 bp, Homo sapiens
ataaatcttaggtca

SEQ ID NO: 39044 - DNA, 15 bp, Homo sapiens
taaatcttaggtcaa

SEQ ID NO: 39045 - DNA, 15 bp, Homo sapiens
aaatcttaggtcaac

SEQ ID NO: 39046 - DNA, 15 bp, Homo sapiens
aatcttaggtcaaca

SEQ ID NO: 39047 - DNA, 15 bp, Homo sapiens
atcttaggtcaacat

SEQ ID NO: 39048 - DNA, 15 bp, Homo sapiens
tcttaggtcaacata

SEQ ID NO: 39049 - DNA, 15 bp, Homo sapiens
cttaggtcaacataa

SEQ ID NO: 39050 - DNA, 15 bp, Homo sapiens
ttaggtcaacataaa

SEQ ID NO: 39051 - DNA, 15 bp, Homo sapiens
taggtcaacataaac

SEQ ID NO: 39052 - DNA, 15 bp, Homo sapiens
aggtcaacataaacc

SEQ ID NO: 39053 - DNA, 15 bp, Homo sapiens
ggtcaacataaacca

SEQ ID NO: 39054 - DNA, 15 bp, Homo sapiens
gtcaacataaaccat

SEQ ID NO: 39055 - DNA, 15 bp, Homo sapiens
tcaacataaaccatc

SEQ ID NO: 39056 - DNA, 15 bp, Homo sapiens
caacataaaccatca

SEQ ID NO: 39057 - DNA, 15 bp, Homo sapiens
aacataaaccatcaa

SEQ ID NO: 39058 - DNA, 15 bp, Homo sapiens
acataaaccatcaag

SEQ ID NO: 39059 - DNA, 15 bp, Homo sapiens
cataaaccatcaagc

SEQ ID NO: 39060 - DNA, 15 bp, Homo sapiens
ataaaccatcaagca

SEQ ID NO: 39061 - DNA, 15 bp, Homo sapiens
taaaccatcaagcat

SEQ ID NO: 39062 - DNA, 15 bp, Homo sapiens
aaaccatcaagcatg

SEQ ID NO: 39063 - DNA, 15 bp, Homo sapiens
aaccatcaagcatgt

SEQ ID NO: 39064 - DNA, 15 bp, Homo sapiens
accatcaagcatgtg

SEQ ID NO: 39065 - DNA, 15 bp, Homo sapiens
ccatcaagcatgtga

SEQ ID NO: 39066 - DNA, 15 bp, Homo sapiens
catcaagcatgtgac

SEQ ID NO: 39067 - DNA, 15 bp, Homo sapiens
atcaagcatgtgact

SEQ ID NO: 39068 - DNA, 15 bp, Homo sapiens
tcaagcatgtgactg

SEQ ID NO: 39069 - DNA, 15 bp, Homo sapiens
caagcatgtgactgt

SEQ ID NO: 39070 - DNA, 15 bp, Homo sapiens
aagcatgtgactgtg

SEQ ID NO: 39071 - DNA, 15 bp, Homo sapiens
agcatgtgactgtga

SEQ ID NO: 39072 - DNA, 15 bp, Homo sapiens
gcatgtgactgtgat

SEQ ID NO: 39073 - DNA, 15 bp, Homo sapiens
catgtgactgtgatg

SEQ ID NO: 39074 - DNA, 15 bp, Homo sapiens
atgtgactgtgatgt

SEQ ID NO: 39075 - DNA, 15 bp, Homo sapiens
tgtgactgtgatgta

SEQ ID NO: 39076 - DNA, 15 bp, Homo sapiens
gtgactgtgatgtat

SEQ ID NO: 39077 - DNA, 15 bp, Homo sapiens
tgactgtgatgtatc

SEQ ID NO: 39078 - DNA, 15 bp, Homo sapiens
gactgtgatgtatct

SEQ ID NO: 39079 - DNA, 15 bp, Homo sapiens
actgtgatgtatctt

SEQ ID NO: 39080 - DNA, 15 bp, Homo sapiens
ctgtgatgtatctta

SEQ ID NO: 39081 - DNA, 15 bp, Homo sapiens
tgtgatgtatcttat

SEQ ID NO: 39082 - DNA, 15 bp, Homo sapiens
gtgatgtatcttatt

SEQ ID NO: 39083 - DNA, 15 bp, Homo sapiens
tgatgtatcttattg

SEQ ID NO: 39084 - DNA, 15 bp, Homo sapiens
gatgtatcttattgg

SEQ ID NO: 39085 - DNA, 15 bp, Homo sapiens
atgtatcttattggg

SEQ ID NO: 39086 - DNA, 15 bp, Homo sapiens
tgtatcttattgggt

SEQ ID NO: 39087 - DNA, 15 bp, Homo sapiens
gtatcttattgggta

SEQ ID NO: 39088 - DNA, 15 bp, Homo sapiens
tatcttattgggtaa

SEQ ID NO: 39089 - DNA, 15 bp, Homo sapiens
atcttattgggtaaa

SEQ ID NO: 39090 - DNA, 15 bp, Homo sapiens
tcttattgggtaaaa

SEQ ID NO: 39091 - DNA, 15 bp, Homo sapiens
cttattgggtaaaag

SEQ ID NO: 39092 - DNA, 15 bp, Homo sapiens
ttattgggtaaaaga

SEQ ID NO: 39093 - DNA, 15 bp, Homo sapiens
tattgggtaaaagag

SEQ ID NO: 39094 - DNA, 15 bp, Homo sapiens
attgggtaaaagagc

SEQ ID NO: 39095 - DNA, 15 bp, Homo sapiens
ttgggtaaaagagcc

SEQ ID NO: 39096 - DNA, 15 bp, Homo sapiens
tgggtaaaagagcca

SEQ ID NO: 39097 - DNA, 15 bp, Homo sapiens
gggtaaaagagccac

SEQ ID NO: 39098 - DNA, 15 bp, Homo sapiens
ggtaaaagagccact

SEQ ID NO: 39099 - DNA, 15 bp, Homo sapiens
gtaaaagagccactg

SEQ ID NO: 39100 - DNA, 15 bp, Homo sapiens
taaaagagccactga

SEQ ID NO: 39101 - DNA, 15 bp, Homo sapiens
aaaagagccactgac

SEQ ID NO: 39102 - DNA, 15 bp, Homo sapiens
aaagagccactgacc

SEQ ID NO: 39103 - DNA, 15 bp, Homo sapiens
aagagccactgacca

SEQ ID NO: 39104 - DNA, 15 bp, Homo sapiens
agagccactgaccac

SEQ ID NO: 39105 - DNA, 15 bp, Homo sapiens
gagccactgaccaca

SEQ ID NO: 39106 - DNA, 15 bp, Homo sapiens
agccactgaccacac

SEQ ID NO: 39107 - DNA, 15 bp, Homo sapiens
gccactgaccacaca

SEQ ID NO: 39108 - DNA, 15 bp, Homo sapiens
ccactgaccacacaa

SEQ ID NO: 39109 - DNA, 15 bp, Homo sapiens
cactgaccacacaat

SEQ ID NO: 39110 - DNA, 15 bp, Homo sapiens
actgaccacacaatt

SEQ ID NO: 39111 - DNA, 15 bp, Homo sapiens
ctgaccacacaattg

SEQ ID NO: 39112 - DNA, 15 bp, Homo sapiens
tgaccacacaattgc

SEQ ID NO: 39113 - DNA, 15 bp, Homo sapiens
gaccacacaattgct

SEQ ID NO: 39114 - DNA, 15 bp, Homo sapiens
accacacaattgctg

SEQ ID NO: 39115 - DNA, 15 bp, Homo sapiens
ccacacaattgctgg

SEQ ID NO: 39116 - DNA, 15 bp, Homo sapiens
cacacaattgctgga

SEQ ID NO: 39117 - DNA, 15 bp, Homo sapiens
acacaattgctggat

SEQ ID NO: 39118 - DNA, 15 bp, Homo sapiens
cacaattgctggatg

SEQ ID NO: 39119 - DNA, 15 bp, Homo sapiens
acaattgctggatgt

SEQ ID NO: 39120 - DNA, 15 bp, Homo sapiens
caattgctggatgtg

SEQ ID NO: 39121 - DNA, 15 bp, Homo sapiens
aattgctggatgtgt

SEQ ID NO: 39122 - DNA, 15 bp, Homo sapiens
attgctggatgtgtc

SEQ ID NO: 39123 - DNA, 15 bp, Homo sapiens
ttgctggatgtgtct

SEQ ID NO: 39124 - DNA, 15 bp, Homo sapiens
tgctggatgtgtctc

SEQ ID NO: 39125 - DNA, 15 bp, Homo sapiens
gctggatgtgtctcc

SEQ ID NO: 39126 - DNA, 15 bp, Homo sapiens
ctggatgtgtctcct

SEQ ID NO: 39127 - DNA, 15 bp, Homo sapiens
tggatgtgtctccta

SEQ ID NO: 39128 - DNA, 15 bp, Homo sapiens
ggatgtgtctcctat

SEQ ID NO: 39129 - DNA, 15 bp, Homo sapiens
gatgtgtctcctatg

SEQ ID NO: 39130 - DNA, 15 bp, Homo sapiens
atgtgtctcctatga

SEQ ID NO: 39131 - DNA, 15 bp, Homo sapiens
tgtgtctcctatgaa

SEQ ID NO: 39132 - DNA, 15 bp, Homo sapiens
gtgtctcctatgaaa

SEQ ID NO: 39133 - DNA, 15 bp, Homo sapiens
tgtctcctatgaaac

SEQ ID NO: 39134 - DNA, 15 bp, Homo sapiens
gtctcctatgaaacc

SEQ ID NO: 39135 - DNA, 15 bp, Homo sapiens
tctcctatgaaacca

SEQ ID NO: 39136 - DNA, 15 bp, Homo sapiens
ctcctatgaaaccac

SEQ ID NO: 39137 - DNA, 15 bp, Homo sapiens
tcctatgaaaccact

SEQ ID NO: 39138 - DNA, 15 bp, Homo sapiens
cctatgaaaccactt

SEQ ID NO: 39139 - DNA, 15 bp, Homo sapiens
ctatgaaaccactta

SEQ ID NO: 39140 - DNA, 15 bp, Homo sapiens
tatgaaaccacttaa

SEQ ID NO: 39141 - DNA, 15 bp, Homo sapiens
atgaaaccacttaac

SEQ ID NO: 39142 - DNA, 15 bp, Homo sapiens
tgaaaccacttaaca

SEQ ID NO: 39143 - DNA, 15 bp, Homo sapiens
gaaaccacttaacag

SEQ ID NO: 39144 - DNA, 15 bp, Homo sapiens
aaaccacttaacaga

SEQ ID NO: 39145 - DNA, 15 bp, Homo sapiens
aaccacttaacagat

SEQ ID NO: 39146 - DNA, 15 bp, Homo sapiens
accacttaacagatc

SEQ ID NO: 39147 - DNA, 15 bp, Homo sapiens
ccacttaacagatct

SEQ ID NO: 39148 - DNA, 15 bp, Homo sapiens
cacttaacagatctg

SEQ ID NO: 39149 - DNA, 15 bp, Homo sapiens
acttaacagatctgg

SEQ ID NO: 39150 - DNA, 15 bp, Homo sapiens
cttaacagatctggc

SEQ ID NO: 39151 - DNA, 15 bp, Homo sapiens
ttaacagatctggcc

SEQ ID NO: 39152 - DNA, 15 bp, Homo sapiens
taacagatctggccc

SEQ ID NO: 39153 - DNA, 15 bp, Homo sapiens
aacagatctggccct

SEQ ID NO: 39154 - DNA, 15 bp, Homo sapiens
acagatctggccctt

SEQ ID NO: 39155 - DNA, 15 bp, Homo sapiens
cagatctggcccttg

SEQ ID NO: 39156 - DNA, 15 bp, Homo sapiens
agatctggcccttgc

SEQ ID NO: 39157 - DNA, 15 bp, Homo sapiens
gatctggcccttgca

SEQ ID NO: 39158 - DNA, 15 bp, Homo sapiens
atctggcccttgcaa

SEQ ID NO: 39159 - DNA, 15 bp, Homo sapiens
tctggcccttgcaat

SEQ ID NO: 39160 - DNA, 15 bp, Homo sapiens
ctggcccttgcaatc

SEQ ID NO: 39161 - DNA, 15 bp, Homo sapiens
tggcccttgcaatcc

SEQ ID NO: 39162 - DNA, 15 bp, Homo sapiens
ggcccttgcaatcct

SEQ ID NO: 39163 - DNA, 15 bp, Homo sapiens
gcccttgcaatcctt

SEQ ID NO: 39164 - DNA, 15 bp, Homo sapiens
cccttgcaatccttt

SEQ ID NO: 39165 - DNA, 15 bp, Homo sapiens
ccttgcaatccttta

SEQ ID NO: 39166 - DNA, 15 bp, Homo sapiens
cttgcaatcctttaa

SEQ ID NO: 39167 - DNA, 15 bp, Homo sapiens
ttgcaatcctttaag

SEQ ID NO: 39168 - DNA, 15 bp, Homo sapiens
tgcaatcctttaagt

SEQ ID NO: 39169 - DNA, 15 bp, Homo sapiens
gcaatcctttaagtt

SEQ ID NO: 39170 - DNA, 15 bp, Homo sapiens
caatcctttaagttt

SEQ ID NO: 39171 - DNA, 15 bp, Homo sapiens
aatcctttaagtttg

SEQ ID NO: 39172 - DNA, 15 bp, Homo sapiens
atcctttaagtttgt

SEQ ID NO: 39173 - DNA, 15 bp, Homo sapiens
tcctttaagtttgtg

SEQ ID NO: 39174 - DNA, 15 bp, Homo sapiens
cctttaagtttgtga

SEQ ID NO: 39175 - DNA, 15 bp, Homo sapiens
ctttaagtttgtgat

SEQ ID NO: 39176 - DNA, 15 bp, Homo sapiens
tttaagtttgtgatg

SEQ ID NO: 39177 - DNA, 15 bp, Homo sapiens
ttaagtttgtgatgg

SEQ ID NO: 39178 - DNA, 15 bp, Homo sapiens
taagtttgtgatggg

SEQ ID NO: 39179 - DNA, 15 bp, Homo sapiens
aagtttgtgatgggg

SEQ ID NO: 39180 - DNA, 15 bp, Homo sapiens
agtttgtgatggggg

SEQ ID NO: 39181 - DNA, 15 bp, Homo sapiens
gtttgtgatgggggg

SEQ ID NO: 39182 - DNA, 15 bp, Homo sapiens
tttgtgatggggggt

SEQ ID NO: 39183 - DNA, 15 bp, Homo sapiens
ttgtgatggggggtt

SEQ ID NO: 39184 - DNA, 15 bp, Homo sapiens
tgtgatggggggttg

SEQ ID NO: 39185 - DNA, 15 bp, Homo sapiens
gtgatggggggttgt

SEQ ID NO: 39186 - DNA, 15 bp, Homo sapiens
tgatggggggttgtt

SEQ ID NO: 39187 - DNA, 15 bp, Homo sapiens
gatggggggttgttt

SEQ ID NO: 39188 - DNA, 15 bp, Homo sapiens
atggggggttgtttg

SEQ ID NO: 39189 - DNA, 15 bp, Homo sapiens
tggggggttgtttgt

SEQ ID NO: 39190 - DNA, 15 bp, Homo sapiens
ggggggttgtttgtt

SEQ ID NO: 39191 - DNA, 15 bp, Homo sapiens
gggggttgtttgttt

SEQ ID NO: 39192 - DNA, 15 bp, Homo sapiens
gggttgtttgtttta

SEQ ID NO: 39193 - DNA, 15 bp, Homo sapiens
ggttgtttgttttaa

SEQ ID NO: 39194 - DNA, 15 bp, Homo sapiens
gttgtttgttttaaa

SEQ ID NO: 39195 - DNA, 15 bp, Homo sapiens
ttgtttgttttaaat

SEQ ID NO: 39196 - DNA, 15 bp, Homo sapiens
tgtttgttttaaatt

SEQ ID NO: 39197 - DNA, 15 bp, Homo sapiens
gtttgttttaaattt

SEQ ID NO: 39198 - DNA, 15 bp, Homo sapiens
tttgttttaaatttg

SEQ ID NO: 39199 - DNA, 15 bp, Homo sapiens
ttgttttaaatttgt

SEQ ID NO: 39200 - DNA, 15 bp, Homo sapiens
tgttttaaatttgtc

SEQ ID NO: 39201 - DNA, 15 bp, Homo sapiens
gttttaaatttgtcc

SEQ ID NO: 39202 - DNA, 15 bp, Homo sapiens
ttttaaatttgtccc

SEQ ID NO: 39203 - DNA, 15 bp, Homo sapiens
tttaaatttgtccct

SEQ ID NO: 39204 - DNA, 15 bp, Homo sapiens
ttaaatttgtccctc

SEQ ID NO: 39205 - DNA, 15 bp, Homo sapiens
taaatttgtccctca

SEQ ID NO: 39206 - DNA, 15 bp, Homo sapiens
aaatttgtccctcaa

SEQ ID NO: 39207 - DNA, 15 bp, Homo sapiens
aatttgtccctcaaa

SEQ ID NO: 39208 - DNA, 15 bp, Homo sapiens
atttgtccctcaaaa

SEQ ID NO: 39209 - DNA, 15 bp, Homo sapiens
tttgtccctcaaaag

SEQ ID NO: 39210 - DNA, 15 bp, Homo sapiens
ttgtccctcaaaagg

SEQ ID NO: 39211 - DNA, 15 bp, Homo sapiens
tgtccctcaaaagga

SEQ ID NO: 39212 - DNA, 15 bp, Homo sapiens
gtccctcaaaaggaa

SEQ ID NO: 39213 - DNA, 15 bp, Homo sapiens
tccctcaaaaggaag

SEQ ID NO: 39214 - DNA, 15 bp, Homo sapiens
ccctcaaaaggaagc

SEQ ID NO: 39215 - DNA, 15 bp, Homo sapiens
cctcaaaaggaagct

SEQ ID NO: 39216 - DNA, 15 bp, Homo sapiens
ctcaaaaggaagctg

SEQ ID NO: 39217 - DNA, 15 bp, Homo sapiens
tcaaaaggaagctgc

SEQ ID NO: 39218 - DNA, 15 bp, Homo sapiens
caaaaggaagctgca

SEQ ID NO: 39219 - DNA, 15 bp, Homo sapiens
aaaaggaagctgcat

SEQ ID NO: 39220 - DNA, 15 bp, Homo sapiens
aaaggaagctgcata

SEQ ID NO: 39221 - DNA, 15 bp, Homo sapiens
aaggaagctgcataa

SEQ ID NO: 39222 - DNA, 15 bp, Homo sapiens
aggaagctgcataaa

SEQ ID NO: 39223 - DNA, 15 bp, Homo sapiens
ggaagctgcataaag

SEQ ID NO: 39224 - DNA, 15 bp, Homo sapiens
gaagctgcataaagt

SEQ ID NO: 39225 - DNA, 15 bp, Homo sapiens
aagctgcataaagtt

SEQ ID NO: 39226 - DNA, 15 bp, Homo sapiens
agctgcataaagttg

SEQ ID NO: 39227 - DNA, 15 bp, Homo sapiens
gctgcataaagttga

SEQ ID NO: 39228 - DNA, 15 bp, Homo sapiens
ctgcataaagttgac

SEQ ID NO: 39229 - DNA, 15 bp, Homo sapiens
tgcataaagttgaca

SEQ ID NO: 39230 - DNA, 15 bp, Homo sapiens
gcataaagttgacat

SEQ ID NO: 39231 - DNA, 15 bp, Homo sapiens
cataaagttgacata

SEQ ID NO: 39232 - DNA, 15 bp, Homo sapiens
ataaagttgacatac

SEQ ID NO: 39233 - DNA, 15 bp, Homo sapiens
taaagttgacataca

SEQ ID NO: 39234 - DNA, 15 bp, Homo sapiens
aaagttgacatacag

SEQ ID NO: 39235 - DNA, 15 bp, Homo sapiens
aagttgacatacagc

SEQ ID NO: 39236 - DNA, 15 bp, Homo sapiens
agttgacatacagca

SEQ ID NO: 39237 - DNA, 15 bp, Homo sapiens
gttgacatacagcag

SEQ ID NO: 39238 - DNA, 15 bp, Homo sapiens
ttgacatacagcaga

SEQ ID NO: 39239 - DNA, 15 bp, Homo sapiens
tgacatacagcagat

SEQ ID NO: 39240 - DNA, 15 bp, Homo sapiens
gacatacagcagata

SEQ ID NO: 39241 - DNA, 15 bp, Homo sapiens
acatacagcagatat

SEQ ID NO: 39242 - DNA, 15 bp, Homo sapiens
catacagcagatatt

SEQ ID NO: 39243 - DNA, 15 bp, Homo sapiens
atacagcagatattc

SEQ ID NO: 39244 - DNA, 15 bp, Homo sapiens
tacagcagatattcc

SEQ ID NO: 39245 - DNA, 15 bp, Homo sapiens
acagcagatattcca

SEQ ID NO: 39246 - DNA, 15 bp, Homo sapiens
cagcagatattccaa

SEQ ID NO: 39247 - DNA, 15 bp, Homo sapiens
agcagatattccaag

SEQ ID NO: 39248 - DNA, 15 bp, Homo sapiens
gcagatattccaagc

SEQ ID NO: 39249 - DNA, 15 bp, Homo sapiens
cagatattccaagca

SEQ ID NO: 39250 - DNA, 15 bp, Homo sapiens
agatattccaagcat

SEQ ID NO: 39251 - DNA, 15 bp, Homo sapiens
gatattccaagcatt

SEQ ID NO: 39252 - DNA, 15 bp, Homo sapiens
atattccaagcattc

SEQ ID NO: 39253 - DNA, 15 bp, Homo sapiens
tattccaagcattcc

SEQ ID NO: 39254 - DNA, 15 bp, Homo sapiens
attccaagcattcct

SEQ ID NO: 39255 - DNA, 15 bp, Homo sapiens
ttccaagcattcctt

SEQ ID NO: 39256 - DNA, 15 bp, Homo sapiens
tccaagcattcctta

SEQ ID NO: 39257 - DNA, 15 bp, Homo sapiens
ccaagcattccttac

SEQ ID NO: 39258 - DNA, 15 bp, Homo sapiens
caagcattccttaca

SEQ ID NO: 39259 - DNA, 15 bp, Homo sapiens
aagcattccttacat

SEQ ID NO: 39260 - DNA, 15 bp, Homo sapiens
agcattccttacata

SEQ ID NO: 39261 - DNA, 15 bp, Homo sapiens
gcattccttacatat

SEQ ID NO: 39262 - DNA, 15 bp, Homo sapiens
cattccttacatatt

SEQ ID NO: 39263 - DNA, 15 bp, Homo sapiens
attccttacatatta

SEQ ID NO: 39264 - DNA, 15 bp, Homo sapiens
ttccttacatattaa

SEQ ID NO: 39265 - DNA, 15 bp, Homo sapiens
tccttacatattaaa

SEQ ID NO: 39266 - DNA, 15 bp, Homo sapiens
ccttacatattaaaa

SEQ ID NO: 39267 - DNA, 15 bp, Homo sapiens
cttacatattaaaaa

SEQ ID NO: 39268 - DNA, 15 bp, Homo sapiens
acatattaaaaataa

SEQ ID NO: 39269 - DNA, 15 bp, Homo sapiens
catattaaaaataat

SEQ ID NO: 39270 - DNA, 15 bp, Homo sapiens
atattaaaaataatt

SEQ ID NO: 39271 - DNA, 15 bp, Homo sapiens
tattaaaaataatta

SEQ ID NO: 39272 - DNA, 15 bp, Homo sapiens
attaaaaataattac

SEQ ID NO: 39273 - DNA, 15 bp, Homo sapiens
ttaaaaataattaca

SEQ ID NO: 39274 - DNA, 15 bp, Homo sapiens
taaaaataattacaa

SEQ ID NO: 39275 - DNA, 15 bp, Homo sapiens
aaaaataattacaaa

SEQ ID NO: 39276 - DNA, 15 bp, Homo sapiens
aaaataattacaaag

SEQ ID NO: 39277 - DNA, 15 bp, Homo sapiens
aaataattacaaaga

SEQ ID NO: 39278 - DNA, 15 bp, Homo sapiens
aataattacaaagat

SEQ ID NO: 39279 - DNA, 15 bp, Homo sapiens
ataattacaaagata

SEQ ID NO: 39280 - DNA, 15 bp, Homo sapiens
taattacaaagataa

SEQ ID NO: 39281 - DNA, 15 bp, Homo sapiens
aattacaaagataat

SEQ ID NO: 39282 - DNA, 15 bp, Homo sapiens
attacaaagataata

SEQ ID NO: 39283 - DNA, 15 bp, Homo sapiens
ttacaaagataatat

SEQ ID NO: 39284 - DNA, 15 bp, Homo sapiens
tacaaagataatatt

SEQ ID NO: 39285 - DNA, 15 bp, Homo sapiens
acaaagataatattt

SEQ ID NO: 39286 - DNA, 15 bp, Homo sapiens
caaagataatatttt

SEQ ID NO: 39287 - DNA, 15 bp, Homo sapiens
aaagataatattttc

SEQ ID NO: 39288 - DNA, 15 bp, Homo sapiens
aagataatattttca

SEQ ID NO: 39289 - DNA, 15 bp, Homo sapiens
agataatattttcaa

SEQ ID NO: 39290 - DNA, 15 bp, Homo sapiens
gataatattttcaaa

SEQ ID NO: 39291 - DNA, 15 bp, Homo sapiens
ataatattttcaaac

SEQ ID NO: 39292 - DNA, 15 bp, Homo sapiens
taatattttcaaaca

SEQ ID NO: 39293 - DNA, 15 bp, Homo sapiens
aatattttcaaacaa

SEQ ID NO: 39294 - DNA, 15 bp, Homo sapiens
atattttcaaacaac

SEQ ID NO: 39295 - DNA, 15 bp, Homo sapiens
tattttcaaacaaca

SEQ ID NO: 39296 - DNA, 15 bp, Homo sapiens
attttcaaacaacac

SEQ ID NO: 39297 - DNA, 15 bp, Homo sapiens
ttttcaaacaacaca

SEQ ID NO: 39298 - DNA, 15 bp, Homo sapiens
tttcaaacaacacaa

SEQ ID NO: 39299 - DNA, 15 bp, Homo sapiens
ttcaaacaacacaaa

SEQ ID NO: 39300 - DNA, 15 bp, Homo sapiens
tcaaacaacacaaaa

SEQ ID NO: 39301 - DNA, 15 bp, Homo sapiens
caaacaacacaaaac

SEQ ID NO: 39302 - DNA, 15 bp, Homo sapiens
aaacaacacaaaaca

SEQ ID NO: 39303 - DNA, 15 bp, Homo sapiens
aacaacacaaaacaa

SEQ ID NO: 39304 - DNA, 15 bp, Homo sapiens
acaacacaaaacaaa

SEQ ID NO: 39305 - DNA, 15 bp, Homo sapiens
caacacaaaacaaat

SEQ ID NO: 39306 - DNA, 15 bp, Homo sapiens
aacacaaaacaaatc

SEQ ID NO: 39307 - DNA, 15 bp, Homo sapiens
acacaaaacaaatct

SEQ ID NO: 39308 - DNA, 15 bp, Homo sapiens
cacaaaacaaatcta

SEQ ID NO: 39309 - DNA, 15 bp, Homo sapiens
acaaaacaaatctac

SEQ ID NO: 39310 - DNA, 15 bp, Homo sapiens
caaaacaaatctaca

SEQ ID NO: 39311 - DNA, 15 bp, Homo sapiens
aaaacaaatctacac

SEQ ID NO: 39312 - DNA, 15 bp, Homo sapiens
aaacaaatctacact

SEQ ID NO: 39313 - DNA, 15 bp, Homo sapiens
aacaaatctacacta

SEQ ID NO: 39314 - DNA, 15 bp, Homo sapiens
acaaatctacactac

SEQ ID NO: 39315 - DNA, 15 bp, Homo sapiens
caaatctacactacg

SEQ ID NO: 39316 - DNA, 15 bp, Homo sapiens
aaatctacactacgt

SEQ ID NO: 39317 - DNA, 15 bp, Homo sapiens
aatctacactacgta

SEQ ID NO: 39318 - DNA, 15 bp, Homo sapiens
atctacactacgtaa

SEQ ID NO: 39319 - DNA, 15 bp, Homo sapiens
tctacactacgtaaa

SEQ ID NO: 39320 - DNA, 15 bp, Homo sapiens
ctacactacgtaaag

SEQ ID NO: 39321 - DNA, 15 bp, Homo sapiens
tacactacgtaaagt

SEQ ID NO: 39322 - DNA, 15 bp, Homo sapiens
acactacgtaaagtc

SEQ ID NO: 39323 - DNA, 15 bp, Homo sapiens
cactacgtaaagtct

SEQ ID NO: 39324 - DNA, 15 bp, Homo sapiens
actacgtaaagtctt

SEQ ID NO: 39325 - DNA, 15 bp, Homo sapiens
ctacgtaaagtcttc

SEQ ID NO: 39326 - DNA, 15 bp, Homo sapiens
tacgtaaagtcttcc

SEQ ID NO: 39327 - DNA, 15 bp, Homo sapiens
acgtaaagtcttcct

SEQ ID NO: 39328 - DNA, 15 bp, Homo sapiens
cgtaaagtcttcctt

SEQ ID NO: 39329 - DNA, 15 bp, Homo sapiens
gtaaagtcttccttc

SEQ ID NO: 39330 - DNA, 15 bp, Homo sapiens
taaagtcttccttct

SEQ ID NO: 39331 - DNA, 15 bp, Homo sapiens
aaagtcttccttctt

SEQ ID NO: 39332 - DNA, 15 bp, Homo sapiens
aagtcttccttcttt

SEQ ID NO: 39333 - DNA, 15 bp, Homo sapiens
agtcttccttctttc

SEQ ID NO: 39334 - DNA, 15 bp, Homo sapiens
gtcttccttctttca

SEQ ID NO: 39335 - DNA, 15 bp, Homo sapiens
tcttccttctttcaa

SEQ ID NO: 39336 - DNA, 15 bp, Homo sapiens
cttccttctttcaaa

SEQ ID NO: 39337 - DNA, 15 bp, Homo sapiens
ttccttctttcaaag

SEQ ID NO: 39338 - DNA, 15 bp, Homo sapiens
tccttctttcaaaga

SEQ ID NO: 39339 - DNA, 15 bp, Homo sapiens
ccttctttcaaagag

SEQ ID NO: 39340 - DNA, 15 bp, Homo sapiens
cttctttcaaagagg

SEQ ID NO: 39341 - DNA, 15 bp, Homo sapiens
ttctttcaaagaggt

SEQ ID NO: 39342 - DNA, 15 bp, Homo sapiens
tctttcaaagaggta

SEQ ID NO: 39343 - DNA, 15 bp, Homo sapiens
ctttcaaagaggtat

SEQ ID NO: 39344 - DNA, 15 bp, Homo sapiens
tttcaaagaggtatt

SEQ ID NO: 39345 - DNA, 15 bp, Homo sapiens
ttcaaagaggtattc

SEQ ID NO: 39346 - DNA, 15 bp, Homo sapiens
tcaaagaggtattca

SEQ ID NO: 39347 - DNA, 15 bp, Homo sapiens
caaagaggtattcag

SEQ ID NO: 39348 - DNA, 15 bp, Homo sapiens
aaagaggtattcaga

SEQ ID NO: 39349 - DNA, 15 bp, Homo sapiens
aagaggtattcagat

SEQ ID NO: 39350 - DNA, 15 bp, Homo sapiens
agaggtattcagatg

SEQ ID NO: 39351 - DNA, 15 bp, Homo sapiens
gaggtattcagatgg

SEQ ID NO: 39352 - DNA, 15 bp, Homo sapiens
aggtattcagatggt

SEQ ID NO: 39353 - DNA, 15 bp, Homo sapiens
ggtattcagatggta

SEQ ID NO: 39354 - DNA, 15 bp, Homo sapiens
gtattcagatggtac

SEQ ID NO: 39355 - DNA, 15 bp, Homo sapiens
tattcagatggtact

SEQ ID NO: 39356 - DNA, 15 bp, Homo sapiens
attcagatggtactg

SEQ ID NO: 39357 - DNA, 15 bp, Homo sapiens
ttcagatggtactgt

SEQ ID NO: 39358 - DNA, 15 bp, Homo sapiens
tcagatggtactgtg

SEQ ID NO: 39359 - DNA, 15 bp, Homo sapiens
cagatggtactgtga

SEQ ID NO: 39360 - DNA, 15 bp, Homo sapiens
agatggtactgtgaa

SEQ ID NO: 39361 - DNA, 15 bp, Homo sapiens
gatggtactgtgaaa

SEQ ID NO: 39362 - DNA, 15 bp, Homo sapiens
atggtactgtgaaag

SEQ ID NO: 39363 - DNA, 15 bp, Homo sapiens
tggtactgtgaaaga

SEQ ID NO: 39364 - DNA, 15 bp, Homo sapiens
ggtactgtgaaagac

SEQ ID NO: 39365 - DNA, 15 bp, Homo sapiens
gtactgtgaaagact

SEQ ID NO: 39366 - DNA, 15 bp, Homo sapiens
tactgtgaaagacta

SEQ ID NO: 39367 - DNA, 15 bp, Homo sapiens
actgtgaaagactag

SEQ ID NO: 39368 - DNA, 15 bp, Homo sapiens
ctgtgaaagactagc

SEQ ID NO: 39369 - DNA, 15 bp, Homo sapiens
tgtgaaagactagct

SEQ ID NO: 39370 - DNA, 15 bp, Homo sapiens
gtgaaagactagctc

SEQ ID NO: 39371 - DNA, 15 bp, Homo sapiens
tgaaagactagctct

SEQ ID NO: 39372 - DNA, 15 bp, Homo sapiens
gaaagactagctcta

SEQ ID NO: 39373 - DNA, 15 bp, Homo sapiens
aaagactagctctaa

SEQ ID NO: 39374 - DNA, 15 bp, Homo sapiens
aagactagctctaaa

SEQ ID NO: 39375 - DNA, 15 bp, Homo sapiens
agactagctctaaat

SEQ ID NO: 39376 - DNA, 15 bp, Homo sapiens
gactagctctaaatg

SEQ ID NO: 39377 - DNA, 15 bp, Homo sapiens
actagctctaaatga

SEQ ID NO: 39378 - DNA, 15 bp, Homo sapiens
ctagctctaaatgaa

SEQ ID NO: 39379 - DNA, 15 bp, Homo sapiens
tagctctaaatgaaa

SEQ ID NO: 39380 - DNA, 15 bp, Homo sapiens
agctctaaatgaaag

SEQ ID NO: 39381 - DNA, 15 bp, Homo sapiens
gctctaaatgaaaga

SEQ ID NO: 39382 - DNA, 15 bp, Homo sapiens
ctctaaatgaaagac

SEQ ID NO: 39383 - DNA, 15 bp, Homo sapiens
tctaaatgaaagact

SEQ ID NO: 39384 - DNA, 15 bp, Homo sapiens
ctaaatgaaagactg

SEQ ID NO: 39385 - DNA, 15 bp, Homo sapiens
taaatgaaagactga

SEQ ID NO: 39386 - DNA, 15 bp, Homo sapiens
aaatgaaagactgaa

SEQ ID NO: 39387 - DNA, 15 bp, Homo sapiens
aatgaaagactgaac

SEQ ID NO: 39388 - DNA, 15 bp, Homo sapiens
atgaaagactgaaca

SEQ ID NO: 39389 - DNA, 15 bp, Homo sapiens
tgaaagactgaacaa

SEQ ID NO: 39390 - DNA, 15 bp, Homo sapiens
gaaagactgaacaaa

SEQ ID NO: 39391 - DNA, 15 bp, Homo sapiens
aaagactgaacaaat

SEQ ID NO: 39392 - DNA, 15 bp, Homo sapiens
aagactgaacaaatt

SEQ ID NO: 39393 - DNA, 15 bp, Homo sapiens
agactgaacaaattg

SEQ ID NO: 39394 - DNA, 15 bp, Homo sapiens
gactgaacaaattga

SEQ ID NO: 39395 - DNA, 15 bp, Homo sapiens
actgaacaaattgaa

SEQ ID NO: 39396 - DNA, 15 bp, Homo sapiens
ctgaacaaattgaaa

SEQ ID NO: 39397 - DNA, 15 bp, Homo sapiens
tgaacaaattgaaat

SEQ ID NO: 39398 - DNA, 15 bp, Homo sapiens
gaacaaattgaaatt

SEQ ID NO: 39399 - DNA, 15 bp, Homo sapiens
aacaaattgaaattc

SEQ ID NO: 39400 - DNA, 15 bp, Homo sapiens
acaaattgaaattct

SEQ ID NO: 39401 - DNA, 15 bp, Homo sapiens
caaattgaaattctt

SEQ ID NO: 39402 - DNA, 15 bp, Homo sapiens
aaattgaaattcttt

SEQ ID NO: 39403 - DNA, 15 bp, Homo sapiens
aattgaaattctttg

SEQ ID NO: 39404 - DNA, 15 bp, Homo sapiens
attgaaattctttgc

SEQ ID NO: 39405 - DNA, 15 bp, Homo sapiens
ttgaaattctttgct

SEQ ID NO: 39406 - DNA, 15 bp, Homo sapiens
tgaaattctttgctg

SEQ ID NO: 39407 - DNA, 15 bp, Homo sapiens
gaaattctttgctga

SEQ ID NO: 39408 - DNA, 15 bp, Homo sapiens
aaattctttgctgat

SEQ ID NO: 39409 - DNA, 15 bp, Homo sapiens
aattctttgctgatg

SEQ ID NO: 39410 - DNA, 15 bp, Homo sapiens
attctttgctgatgg

SEQ ID NO: 39411 - DNA, 15 bp, Homo sapiens
ttctttgctgatggt

SEQ ID NO: 39412 - DNA, 15 bp, Homo sapiens
tctttgctgatggta

SEQ ID NO: 39413 - DNA, 15 bp, Homo sapiens
ctttgctgatggtat

SEQ ID NO: 39414 - DNA, 15 bp, Homo sapiens
tttgctgatggtatc

SEQ ID NO: 39415 - DNA, 15 bp, Homo sapiens
ttgctgatggtatct

SEQ ID NO: 39416 - DNA, 15 bp, Homo sapiens
tgctgatggtatctt

SEQ ID NO: 39417 - DNA, 15 bp, Homo sapiens
gctgatggtatcttc

SEQ ID NO: 39418 - DNA, 15 bp, Homo sapiens
ctgatggtatcttca

SEQ ID NO: 39419 - DNA, 15 bp, Homo sapiens
tgatggtatcttcat

SEQ ID NO: 39420 - DNA, 15 bp, Homo sapiens
gatggtatcttcatt

SEQ ID NO: 39421 - DNA, 15 bp, Homo sapiens
atggtatcttcattc

SEQ ID NO: 39422 - DNA, 15 bp, Homo sapiens
tggtatcttcattcc

SEQ ID NO: 39423 - DNA, 15 bp, Homo sapiens
ggtatcttcattcct

SEQ ID NO: 39424 - DNA, 15 bp, Homo sapiens
gtatcttcattcctg

SEQ ID NO: 39425 - DNA, 15 bp, Homo sapiens
tatcttcattcctgg

SEQ ID NO: 39426 - DNA, 15 bp, Homo sapiens
atcttcattcctggg

SEQ ID NO: 39427 - DNA, 15 bp, Homo sapiens
tcttcattcctgggt

SEQ ID NO: 39428 - DNA, 15 bp, Homo sapiens
cttcattcctgggtt

SEQ ID NO: 39429 - DNA, 15 bp, Homo sapiens
ttcattcctgggtta

SEQ ID NO: 39430 - DNA, 15 bp, Homo sapiens
tcattcctgggttat

SEQ ID NO: 39431 - DNA, 15 bp, Homo sapiens
cattcctgggttatg

SEQ ID NO: 39432 - DNA, 15 bp, Homo sapiens
attcctgggttatgg

SEQ ID NO: 39433 - DNA, 15 bp, Homo sapiens
ttcctgggttatggt

SEQ ID NO: 39434 - DNA, 15 bp, Homo sapiens
tcctgggttatggtg

SEQ ID NO: 39435 - DNA, 15 bp, Homo sapiens
cctgggttatggtga

SEQ ID NO: 39436 - DNA, 15 bp, Homo sapiens
ctgggttatggtgaa

SEQ ID NO: 39437 - DNA, 15 bp, Homo sapiens
tgggttatggtgaac

SEQ ID NO: 39438 - DNA, 15 bp, Homo sapiens
gggttatggtgaaca

SEQ ID NO: 39439 - DNA, 15 bp, Homo sapiens
ggttatggtgaacat

SEQ ID NO: 39440 - DNA, 15 bp, Homo sapiens
gttatggtgaacatc

SEQ ID NO: 39441 - DNA, 15 bp, Homo sapiens
ttatggtgaacatcc

SEQ ID NO: 39442 - DNA, 15 bp, Homo sapiens
tatggtgaacatcct

SEQ ID NO: 39443 - DNA, 15 bp, Homo sapiens
atggtgaacatcctc

SEQ ID NO: 39444 - DNA, 15 bp, Homo sapiens
tggtgaacatcctct

SEQ ID NO: 39445 - DNA, 15 bp, Homo sapiens
ggtgaacatcctctt

SEQ ID NO: 39446 - DNA, 15 bp, Homo sapiens
gtgaacatcctcttt

SEQ ID NO: 39447 - DNA, 15 bp, Homo sapiens
tgaacatcctctttt

SEQ ID NO: 39448 - DNA, 15 bp, Homo sapiens
gaacatcctcttttg

SEQ ID NO: 39449 - DNA, 15 bp, Homo sapiens
aacatcctcttttgc

SEQ ID NO: 39450 - DNA, 15 bp, Homo sapiens
acatcctcttttgct

SEQ ID NO: 39451 - DNA, 15 bp, Homo sapiens
catcctcttttgctt

SEQ ID NO: 39452 - DNA, 15 bp, Homo sapiens
atcctcttttgctta

SEQ ID NO: 39453 - DNA, 15 bp, Homo sapiens
tcctcttttgcttat

SEQ ID NO: 39454 - DNA, 15 bp, Homo sapiens
cctcttttgcttatc

SEQ ID NO: 39455 - DNA, 15 bp, Homo sapiens
ctcttttgcttatcc

SEQ ID NO: 39456 - DNA, 15 bp, Homo sapiens
tcttttgcttatccc

SEQ ID NO: 39457 - DNA, 15 bp, Homo sapiens
cttttgcttatccct

SEQ ID NO: 39458 - DNA, 15 bp, Homo sapiens
ttttgcttatccctc

SEQ ID NO: 39459 - DNA, 15 bp, Homo sapiens
tttgcttatccctca

SEQ ID NO: 39460 - DNA, 15 bp, Homo sapiens
ttgcttatccctcac

SEQ ID NO: 39461 - DNA, 15 bp, Homo sapiens
tgcttatccctcacc

SEQ ID NO: 39462 - DNA, 15 bp, Homo sapiens
gcttatccctcaccc

SEQ ID NO: 39463 - DNA, 15 bp, Homo sapiens
cttatccctcaccct

SEQ ID NO: 39464 - DNA, 15 bp, Homo sapiens
ttatccctcacccta

SEQ ID NO: 39465 - DNA, 15 bp, Homo sapiens
tatccctcaccctac

SEQ ID NO: 39466 - DNA, 15 bp, Homo sapiens
atccctcaccctact

SEQ ID NO: 39467 - DNA, 15 bp, Homo sapiens
tccctcaccctacta

SEQ ID NO: 39468 - DNA, 15 bp, Homo sapiens
ccctcaccctactaa

SEQ ID NO: 39469 - DNA, 15 bp, Homo sapiens
cctcaccctactaag

SEQ ID NO: 39470 - DNA, 15 bp, Homo sapiens
ctcaccctactaaga

SEQ ID NO: 39471 - DNA, 15 bp, Homo sapiens
tcaccctactaagat

SEQ ID NO: 39472 - DNA, 15 bp, Homo sapiens
caccctactaagatg

SEQ ID NO: 39473 - DNA, 15 bp, Homo sapiens
accctactaagatgc

SEQ ID NO: 39474 - DNA, 15 bp, Homo sapiens
ccctactaagatgca

SEQ ID NO: 39475 - DNA, 15 bp, Homo sapiens
cctactaagatgcag

SEQ ID NO: 39476 - DNA, 15 bp, Homo sapiens
ctactaagatgcagc

SEQ ID NO: 39477 - DNA, 15 bp, Homo sapiens
tactaagatgcagca

SEQ ID NO: 39478 - DNA, 15 bp, Homo sapiens
actaagatgcagcaa

SEQ ID NO: 39479 - DNA, 15 bp, Homo sapiens
ctaagatgcagcaat

SEQ ID NO: 39480 - DNA, 15 bp, Homo sapiens
taagatgcagcaatt

SEQ ID NO: 39481 - DNA, 15 bp, Homo sapiens
aagatgcagcaattg

SEQ ID NO: 39482 - DNA, 15 bp, Homo sapiens
agatgcagcaattgc

SEQ ID NO: 39483 - DNA, 15 bp, Homo sapiens
gatgcagcaattgct

SEQ ID NO: 39484 - DNA, 15 bp, Homo sapiens
atgcagcaattgctt

SEQ ID NO: 39485 - DNA, 15 bp, Homo sapiens
tgcagcaattgcttg

SEQ ID NO: 39486 - DNA, 15 bp, Homo sapiens
gcagcaattgcttgg

SEQ ID NO: 39487 - DNA, 15 bp, Homo sapiens
cagcaattgcttggg

SEQ ID NO: 39488 - DNA, 15 bp, Homo sapiens
agcaattgcttgggg

SEQ ID NO: 39489 - DNA, 15 bp, Homo sapiens
gcaattgcttggggc

SEQ ID NO: 39490 - DNA, 15 bp, Homo sapiens
caattgcttggggct

SEQ ID NO: 39491 - DNA, 15 bp, Homo sapiens
aattgcttggggctt

SEQ ID NO: 39492 - DNA, 15 bp, Homo sapiens
attgcttggggcttt

SEQ ID NO: 39493 - DNA, 15 bp, Homo sapiens
ttgcttggggctttc

SEQ ID NO: 39494 - DNA, 15 bp, Homo sapiens
tgcttggggctttct

SEQ ID NO: 39495 - DNA, 15 bp, Homo sapiens
gcttggggctttctg

SEQ ID NO: 39496 - DNA, 15 bp, Homo sapiens
cttggggctttctga

SEQ ID NO: 39497 - DNA, 15 bp, Homo sapiens
ttggggctttctgat

SEQ ID NO: 39498 - DNA, 15 bp, Homo sapiens
tggggctttctgata

SEQ ID NO: 39499 - DNA, 15 bp, Homo sapiens
ggggctttctgatac

SEQ ID NO: 39500 - DNA, 15 bp, Homo sapiens
gggctttctgatact

SEQ ID NO: 39501 - DNA, 15 bp, Homo sapiens
ggctttctgatactt

SEQ ID NO: 39502 - DNA, 15 bp, Homo sapiens
gctttctgatactta

SEQ ID NO: 39503 - DNA, 15 bp, Homo sapiens
ctttctgatacttaa

SEQ ID NO: 39504 - DNA, 15 bp, Homo sapiens
tttctgatacttaag

SEQ ID NO: 39505 - DNA, 15 bp, Homo sapiens
ttctgatacttaagg

SEQ ID NO: 39506 - DNA, 15 bp, Homo sapiens
tctgatacttaagga

SEQ ID NO: 39507 - DNA, 15 bp, Homo sapiens
ctgatacttaaggat

SEQ ID NO: 39508 - DNA, 15 bp, Homo sapiens
tgatacttaaggatg

SEQ ID NO: 39509 - DNA, 15 bp, Homo sapiens
gatacttaaggatgc

SEQ ID NO: 39510 - DNA, 15 bp, Homo sapiens
atacttaaggatgct

SEQ ID NO: 39511 - DNA, 15 bp, Homo sapiens
tacttaaggatgctg

SEQ ID NO: 39512 - DNA, 15 bp, Homo sapiens
acttaaggatgctgg

SEQ ID NO: 39513 - DNA, 15 bp, Homo sapiens
cttaaggatgctggt

SEQ ID NO: 39514 - DNA, 15 bp, Homo sapiens
ttaaggatgctggtc

SEQ ID NO: 39515 - DNA, 15 bp, Homo sapiens
taaggatgctggtcc

SEQ ID NO: 39516 - DNA, 15 bp, Homo sapiens
aaggatgctggtcca

SEQ ID NO: 39517 - DNA, 15 bp, Homo sapiens
aggatgctggtccaa

SEQ ID NO: 39518 - DNA, 15 bp, Homo sapiens
ggatgctggtccaag

SEQ ID NO: 39519 - DNA, 15 bp, Homo sapiens
gatgctggtccaagt

SEQ ID NO: 39520 - DNA, 15 bp, Homo sapiens
atgctggtccaagtg

SEQ ID NO: 39521 - DNA, 15 bp, Homo sapiens
tgctggtccaagtgg

SEQ ID NO: 39522 - DNA, 15 bp, Homo sapiens
gctggtccaagtggt

SEQ ID NO: 39523 - DNA, 15 bp, Homo sapiens
ctggtccaagtggtg

SEQ ID NO: 39524 - DNA, 15 bp, Homo sapiens
tggtccaagtggtga

SEQ ID NO: 39525 - DNA, 15 bp, Homo sapiens
ggtccaagtggtgat

SEQ ID NO: 39526 - DNA, 15 bp, Homo sapiens
gtccaagtggtgatc

SEQ ID NO: 39527 - DNA, 15 bp, Homo sapiens
tccaagtggtgatca

SEQ ID NO: 39528 - DNA, 15 bp, Homo sapiens
ccaagtggtgatcac

SEQ ID NO: 39529 - DNA, 15 bp, Homo sapiens
caagtggtgatcact

SEQ ID NO: 39530 - DNA, 15 bp, Homo sapiens
aagtggtgatcacta

SEQ ID NO: 39531 - DNA, 15 bp, Homo sapiens
agtggtgatcactaa

SEQ ID NO: 39532 - DNA, 15 bp, Homo sapiens
gtggtgatcactaac

SEQ ID NO: 39533 - DNA, 15 bp, Homo sapiens
tggtgatcactaaca

SEQ ID NO: 39534 - DNA, 15 bp, Homo sapiens
ggtgatcactaacat

SEQ ID NO: 39535 - DNA, 15 bp, Homo sapiens
gtgatcactaacatt

SEQ ID NO: 39536 - DNA, 15 bp, Homo sapiens
tgatcactaacattt

SEQ ID NO: 39537 - DNA, 15 bp, Homo sapiens
gatcactaacatttt

SEQ ID NO: 39538 - DNA, 15 bp, Homo sapiens
atcactaacattttc

SEQ ID NO: 39539 - DNA, 15 bp, Homo sapiens
tcactaacattttca

SEQ ID NO: 39540 - DNA, 15 bp, Homo sapiens
cactaacattttcag

SEQ ID NO: 39541 - DNA, 15 bp, Homo sapiens
actaacattttcagg

SEQ ID NO: 39542 - DNA, 15 bp, Homo sapiens
ctaacattttcaggt

SEQ ID NO: 39543 - DNA, 15 bp, Homo sapiens
taacattttcaggtg

SEQ ID NO: 39544 - DNA, 15 bp, Homo sapiens
aacattttcaggtgt

SEQ ID NO: 39545 - DNA, 15 bp, Homo sapiens
acattttcaggtgtg

SEQ ID NO: 39546 - DNA, 15 bp, Homo sapiens
cattttcaggtgtga

SEQ ID NO: 39547 - DNA, 15 bp, Homo sapiens
attttcaggtgtgaa

SEQ ID NO: 39548 - DNA, 15 bp, Homo sapiens
ttttcaggtgtgaaa

SEQ ID NO: 39549 - DNA, 15 bp, Homo sapiens
tttcaggtgtgaaat

SEQ ID NO: 39550 - DNA, 15 bp, Homo sapiens
ttcaggtgtgaaatg

SEQ ID NO: 39551 - DNA, 15 bp, Homo sapiens
tcaggtgtgaaatgg

SEQ ID NO: 39552 - DNA, 15 bp, Homo sapiens
caggtgtgaaatggg

SEQ ID NO: 39553 - DNA, 15 bp, Homo sapiens
aggtgtgaaatgggc

SEQ ID NO: 39554 - DNA, 15 bp, Homo sapiens
ggtgtgaaatgggct

SEQ ID NO: 39555 - DNA, 15 bp, Homo sapiens
gtgtgaaatgggctg

SEQ ID NO: 39556 - DNA, 15 bp, Homo sapiens
tgtgaaatgggctga

SEQ ID NO: 39557 - DNA, 15 bp, Homo sapiens
gtgaaatgggctgaa

SEQ ID NO: 39558 - DNA, 15 bp, Homo sapiens
tgaaatgggctgaat

SEQ ID NO: 39559 - DNA, 15 bp, Homo sapiens
gaaatgggctgaatg

SEQ ID NO: 39560 - DNA, 15 bp, Homo sapiens
aaatgggctgaatgg

SEQ ID NO: 39561 - DNA, 15 bp, Homo sapiens
aatgggctgaatggg

SEQ ID NO: 39562 - DNA, 15 bp, Homo sapiens
atgggctgaatgggc

SEQ ID NO: 39563 - DNA, 15 bp, Homo sapiens
tgggctgaatgggct

SEQ ID NO: 39564 - DNA, 15 bp, Homo sapiens
gggctgaatgggctt

SEQ ID NO: 39565 - DNA, 15 bp, Homo sapiens
ggctgaatgggctta

SEQ ID NO: 39566 - DNA, 15 bp, Homo sapiens
gctgaatgggcttag

SEQ ID NO: 39567 - DNA, 15 bp, Homo sapiens
ctgaatgggcttaga

SEQ ID NO: 39568 - DNA, 15 bp, Homo sapiens
tgaatgggcttagag

SEQ ID NO: 39569 - DNA, 15 bp, Homo sapiens
gaatgggcttagagc

SEQ ID NO: 39570 - DNA, 15 bp, Homo sapiens
aatgggcttagagct

SEQ ID NO: 39571 - DNA, 15 bp, Homo sapiens
atgggcttagagctc

SEQ ID NO: 39572 - DNA, 15 bp, Homo sapiens
tgggcttagagctct

SEQ ID NO: 39573 - DNA, 15 bp, Homo sapiens
gggcttagagctcta

SEQ ID NO: 39574 - DNA, 15 bp, Homo sapiens
ggcttagagctctag

SEQ ID NO: 39575 - DNA, 15 bp, Homo sapiens
gcttagagctctagt

SEQ ID NO: 39576 - DNA, 15 bp, Homo sapiens
cttagagctctagtt

SEQ ID NO: 39577 - DNA, 15 bp, Homo sapiens
ttagagctctagttt

SEQ ID NO: 39578 - DNA, 15 bp, Homo sapiens
tagagctctagtttt

SEQ ID NO: 39579 - DNA, 15 bp, Homo sapiens
agagctctagttttc

SEQ ID NO: 39580 - DNA, 15 bp, Homo sapiens
gagctctagttttca

SEQ ID NO: 39581 - DNA, 15 bp, Homo sapiens
agctctagttttcac

SEQ ID NO: 39582 - DNA, 15 bp, Homo sapiens
gctctagttttcact

SEQ ID NO: 39583 - DNA, 15 bp, Homo sapiens
ctctagttttcactg

SEQ ID NO: 39584 - DNA, 15 bp, Homo sapiens
tctagttttcactgg

SEQ ID NO: 39585 - DNA, 15 bp, Homo sapiens
ctagttttcactggg

SEQ ID NO: 39586 - DNA, 15 bp, Homo sapiens
tagttttcactgggg

SEQ ID NO: 39587 - DNA, 15 bp, Homo sapiens
agttttcactgggga

SEQ ID NO: 39588 - DNA, 15 bp, Homo sapiens
gttttcactggggat

SEQ ID NO: 39589 - DNA, 15 bp, Homo sapiens
ttttcactggggatc

SEQ ID NO: 39590 - DNA, 15 bp, Homo sapiens
tttcactggggatcc

SEQ ID NO: 39591 - DNA, 15 bp, Homo sapiens
ttcactggggatcca

SEQ ID NO: 39592 - DNA, 15 bp, Homo sapiens
tcactggggatccat

SEQ ID NO: 39593 - DNA, 15 bp, Homo sapiens
cactggggatccatt

SEQ ID NO: 39594 - DNA, 15 bp, Homo sapiens
actggggatccattt

SEQ ID NO: 39595 - DNA, 15 bp, Homo sapiens
ctggggatccatttt

SEQ ID NO: 39596 - DNA, 15 bp, Homo sapiens
tggggatccattttt

SEQ ID NO: 39597 - DNA, 15 bp, Homo sapiens
ggggatccatttttc

SEQ ID NO: 39598 - DNA, 15 bp, Homo sapiens
gggatccatttttcc

SEQ ID NO: 39599 - DNA, 15 bp, Homo sapiens
ggatccatttttcca

SEQ ID NO: 39600 - DNA, 15 bp, Homo sapiens
gatccatttttccaa

SEQ ID NO: 39601 - DNA, 15 bp, Homo sapiens
atccatttttccaag

SEQ ID NO: 39602 - DNA, 15 bp, Homo sapiens
tccatttttccaaga

SEQ ID NO: 39603 - DNA, 15 bp, Homo sapiens
ccatttttccaagaa

SEQ ID NO: 39604 - DNA, 15 bp, Homo sapiens
catttttccaagaac

SEQ ID NO: 39605 - DNA, 15 bp, Homo sapiens
atttttccaagaacc

SEQ ID NO: 39606 - DNA, 15 bp, Homo sapiens
tttttccaagaacca

SEQ ID NO: 39607 - DNA, 15 bp, Homo sapiens
ttttccaagaaccac

SEQ ID NO: 39608 - DNA, 15 bp, Homo sapiens
tttccaagaaccact

SEQ ID NO: 39609 - DNA, 15 bp, Homo sapiens
ttccaagaaccacta

SEQ ID NO: 39610 - DNA, 15 bp, Homo sapiens
tccaagaaccactat

SEQ ID NO: 39611 - DNA, 15 bp, Homo sapiens
ccaagaaccactatt

SEQ ID NO: 39612 - DNA, 15 bp, Homo sapiens
caagaaccactattt

SEQ ID NO: 39613 - DNA, 15 bp, Homo sapiens
aagaaccactatttc

SEQ ID NO: 39614 - DNA, 15 bp, Homo sapiens
agaaccactatttca

SEQ ID NO: 39615 - DNA, 15 bp, Homo sapiens
gaaccactatttcag

SEQ ID NO: 39616 - DNA, 15 bp, Homo sapiens
aaccactatttcagg

SEQ ID NO: 39617 - DNA, 15 bp, Homo sapiens
accactatttcaggc

SEQ ID NO: 39618 - DNA, 15 bp, Homo sapiens
ccactatttcaggct

SEQ ID NO: 39619 - DNA, 15 bp, Homo sapiens
cactatttcaggctc

SEQ ID NO: 39620 - DNA, 15 bp, Homo sapiens
actatttcaggctcc

SEQ ID NO: 39621 - DNA, 15 bp, Homo sapiens
ctatttcaggctccc

SEQ ID NO: 39622 - DNA, 15 bp, Homo sapiens
tatttcaggctccca

SEQ ID NO: 39623 - DNA, 15 bp, Homo sapiens
atttcaggctcccaa

SEQ ID NO: 39624 - DNA, 15 bp, Homo sapiens
tttcaggctcccaac

SEQ ID NO: 39625 - DNA, 15 bp, Homo sapiens
ttcaggctcccaact

SEQ ID NO: 39626 - DNA, 15 bp, Homo sapiens
tcaggctcccaactt

SEQ ID NO: 39627 - DNA, 15 bp, Homo sapiens
caggctcccaacttg

SEQ ID NO: 39628 - DNA, 15 bp, Homo sapiens
aggctcccaacttga

SEQ ID NO: 39629 - DNA, 15 bp, Homo sapiens
ggctcccaacttgac

SEQ ID NO: 39630 - DNA, 15 bp, Homo sapiens
gctcccaacttgact

SEQ ID NO: 39631 - DNA, 15 bp, Homo sapiens
ctcccaacttgactt

SEQ ID NO: 39632 - DNA, 15 bp, Homo sapiens
tcccaacttgacttc

SEQ ID NO: 39633 - DNA, 15 bp, Homo sapiens
cccaacttgacttct

SEQ ID NO: 39634 - DNA, 15 bp, Homo sapiens
ccaacttgacttctc

SEQ ID NO: 39635 - DNA, 15 bp, Homo sapiens
caacttgacttctcc

SEQ ID NO: 39636 - DNA, 15 bp, Homo sapiens
aacttgacttctcct

SEQ ID NO: 39637 - DNA, 15 bp, Homo sapiens
acttgacttctccta

SEQ ID NO: 39638 - DNA, 15 bp, Homo sapiens
cttgacttctcctaa

SEQ ID NO: 39639 - DNA, 15 bp, Homo sapiens
ttgacttctcctaac

SEQ ID NO: 39640 - DNA, 15 bp, Homo sapiens
tgacttctcctaacc

SEQ ID NO: 39641 - DNA, 15 bp, Homo sapiens
gacttctcctaaccc

SEQ ID NO: 39642 - DNA, 15 bp, Homo sapiens
acttctcctaaccca

SEQ ID NO: 39643 - DNA, 15 bp, Homo sapiens
cttctcctaacccaa

SEQ ID NO: 39644 - DNA, 15 bp, Homo sapiens
ttctcctaacccaaa

SEQ ID NO: 39645 - DNA, 15 bp, Homo sapiens
tctcctaacccaaaa

SEQ ID NO: 39646 - DNA, 15 bp, Homo sapiens
ctcctaacccaaaat

SEQ ID NO: 39647 - DNA, 15 bp, Homo sapiens
tcctaacccaaaatg

SEQ ID NO: 39648 - DNA, 15 bp, Homo sapiens
cctaacccaaaatgg

SEQ ID NO: 39649 - DNA, 15 bp, Homo sapiens
ctaacccaaaatggc

SEQ ID NO: 39650 - DNA, 15 bp, Homo sapiens
taacccaaaatggca

SEQ ID NO: 39651 - DNA, 15 bp, Homo sapiens
aacccaaaatggcag

SEQ ID NO: 39652 - DNA, 15 bp, Homo sapiens
acccaaaatggcaga

SEQ ID NO: 39653 - DNA, 15 bp, Homo sapiens
cccaaaatggcagag

SEQ ID NO: 39654 - DNA, 15 bp, Homo sapiens
ccaaaatggcagagg

SEQ ID NO: 39655 - DNA, 15 bp, Homo sapiens
caaaatggcagaggt

SEQ ID NO: 39656 - DNA, 15 bp, Homo sapiens
aaaatggcagaggtg

SEQ ID NO: 39657 - DNA, 15 bp, Homo sapiens
aaatggcagaggtga

SEQ ID NO: 39658 - DNA, 15 bp, Homo sapiens
aatggcagaggtgag

SEQ ID NO: 39659 - DNA, 15 bp, Homo sapiens
atggcagaggtgagg

SEQ ID NO: 39660 - DNA, 15 bp, Homo sapiens
tggcagaggtgaggc

SEQ ID NO: 39661 - DNA, 15 bp, Homo sapiens
ggcagaggtgaggca

SEQ ID NO: 39662 - DNA, 15 bp, Homo sapiens
gcagaggtgaggcag

SEQ ID NO: 39663 - DNA, 15 bp, Homo sapiens
cagaggtgaggcagg

SEQ ID NO: 39664 - DNA, 15 bp, Homo sapiens
agaggtgaggcaggg

SEQ ID NO: 39665 - DNA, 15 bp, Homo sapiens
gaggtgaggcaggga

SEQ ID NO: 39666 - DNA, 15 bp, Homo sapiens
aggtgaggcagggac

SEQ ID NO: 39667 - DNA, 15 bp, Homo sapiens
ggtgaggcagggacc

SEQ ID NO: 39668 - DNA, 15 bp, Homo sapiens
gtgaggcagggaccc

SEQ ID NO: 39669 - DNA, 15 bp, Homo sapiens
tgaggcagggaccct

SEQ ID NO: 39670 - DNA, 15 bp, Homo sapiens
gaggcagggaccctc

SEQ ID NO: 39671 - DNA, 15 bp, Homo sapiens
aggcagggaccctct

SEQ ID NO: 39672 - DNA, 15 bp, Homo sapiens
ggcagggaccctctc

SEQ ID NO: 39673 - DNA, 15 bp, Homo sapiens
gcagggaccctctcc

SEQ ID NO: 39674 - DNA, 15 bp, Homo sapiens
cagggaccctctcca

SEQ ID NO: 39675 - DNA, 15 bp, Homo sapiens
agggaccctctccat

SEQ ID NO: 39676 - DNA, 15 bp, Homo sapiens
gggaccctctccatg

SEQ ID NO: 39677 - DNA, 15 bp, Homo sapiens
ggaccctctccatga

SEQ ID NO: 39678 - DNA, 15 bp, Homo sapiens
gaccctctccatgaa

SEQ ID NO: 39679 - DNA, 15 bp, Homo sapiens
accctctccatgaac

SEQ ID NO: 39680 - DNA, 15 bp, Homo sapiens
ccctctccatgaaca

SEQ ID NO: 39681 - DNA, 15 bp, Homo sapiens
cctctccatgaacag

SEQ ID NO: 39682 - DNA, 15 bp, Homo sapiens
ctctccatgaacaga

SEQ ID NO: 39683 - DNA, 15 bp, Homo sapiens
tctccatgaacagac

SEQ ID NO: 39684 - DNA, 15 bp, Homo sapiens
ctccatgaacagaca

SEQ ID NO: 39685 - DNA, 15 bp, Homo sapiens
tccatgaacagacag

SEQ ID NO: 39686 - DNA, 15 bp, Homo sapiens
ccatgaacagacagg

SEQ ID NO: 39687 - DNA, 15 bp, Homo sapiens
catgaacagacagga

SEQ ID NO: 39688 - DNA, 15 bp, Homo sapiens
atgaacagacaggat

SEQ ID NO: 39689 - DNA, 15 bp, Homo sapiens
tgaacagacaggatg

SEQ ID NO: 39690 - DNA, 15 bp, Homo sapiens
gaacagacaggatgg

SEQ ID NO: 39691 - DNA, 15 bp, Homo sapiens
aacagacaggatggg

SEQ ID NO: 39692 - DNA, 15 bp, Homo sapiens
acagacaggatgggc

SEQ ID NO: 39693 - DNA, 15 bp, Homo sapiens
cagacaggatgggca

SEQ ID NO: 39694 - DNA, 15 bp, Homo sapiens
agacaggatgggcag

SEQ ID NO: 39695 - DNA, 15 bp, Homo sapiens
gacaggatgggcaga

SEQ ID NO: 39696 - DNA, 15 bp, Homo sapiens
acaggatgggcagaa

SEQ ID NO: 39697 - DNA, 15 bp, Homo sapiens
caggatgggcagaag

SEQ ID NO: 39698 - DNA, 15 bp, Homo sapiens
aggatgggcagaagg

SEQ ID NO: 39699 - DNA, 15 bp, Homo sapiens
ggatgggcagaaggt

SEQ ID NO: 39700 - DNA, 15 bp, Homo sapiens
gatgggcagaaggtt

SEQ ID NO: 39701 - DNA, 15 bp, Homo sapiens
atgggcagaaggttg

SEQ ID NO: 39702 - DNA, 15 bp, Homo sapiens
tgggcagaaggttgc

SEQ ID NO: 39703 - DNA, 15 bp, Homo sapiens
gggcagaaggttgct

SEQ ID NO: 39704 - DNA, 15 bp, Homo sapiens
ggcagaaggttgctg

SEQ ID NO: 39705 - DNA, 15 bp, Homo sapiens
gcagaaggttgctgt

SEQ ID NO: 39706 - DNA, 15 bp, Homo sapiens
cagaaggttgctgtg

SEQ ID NO: 39707 - DNA, 15 bp, Homo sapiens
agaaggttgctgtgg

SEQ ID NO: 39708 - DNA, 15 bp, Homo sapiens
gaaggttgctgtggc

SEQ ID NO: 39709 - DNA, 15 bp, Homo sapiens
aaggttgctgtggcc

SEQ ID NO: 39710 - DNA, 15 bp, Homo sapiens
aggttgctgtggcct

SEQ ID NO: 39711 - DNA, 15 bp, Homo sapiens
ggttgctgtggcctt

SEQ ID NO: 39712 - DNA, 15 bp, Homo sapiens
gttgctgtggccttc

SEQ ID NO: 39713 - DNA, 15 bp, Homo sapiens
ttgctgtggccttca

SEQ ID NO: 39714 - DNA, 15 bp, Homo sapiens
tgctgtggccttcac

SEQ ID NO: 39715 - DNA, 15 bp, Homo sapiens
gctgtggccttcact

SEQ ID NO: 39716 - DNA, 15 bp, Homo sapiens
ctgtggccttcactg

SEQ ID NO: 39717 - DNA, 15 bp, Homo sapiens
tgtggccttcactgg

SEQ ID NO: 39718 - DNA, 15 bp, Homo sapiens
gtggccttcactggg

SEQ ID NO: 39719 - DNA, 15 bp, Homo sapiens
tggccttcactgggg

SEQ ID NO: 39720 - DNA, 15 bp, Homo sapiens
ggccttcactgggga

SEQ ID NO: 39721 - DNA, 15 bp, Homo sapiens
gccttcactggggag

SEQ ID NO: 39722 - DNA, 15 bp, Homo sapiens
ccttcactggggagc

SEQ ID NO: 39723 - DNA, 15 bp, Homo sapiens
cttcactggggagca

SEQ ID NO: 39724 - DNA, 15 bp, Homo sapiens
ttcactggggagcaa

SEQ ID NO: 39725 - DNA, 15 bp, Homo sapiens
tcactggggagcaaa

SEQ ID NO: 39726 - DNA, 15 bp, Homo sapiens
cactggggagcaaaa

SEQ ID NO: 39727 - DNA, 15 bp, Homo sapiens
actggggagcaaaat

SEQ ID NO: 39728 - DNA, 15 bp, Homo sapiens
ctggggagcaaaatt

SEQ ID NO: 39729 - DNA, 15 bp, Homo sapiens
tggggagcaaaattt

SEQ ID NO: 39730 - DNA, 15 bp, Homo sapiens
ggggagcaaaatttt

SEQ ID NO: 39731 - DNA, 15 bp, Homo sapiens
gggagcaaaattttg

SEQ ID NO: 39732 - DNA, 15 bp, Homo sapiens
ggagcaaaattttgt

SEQ ID NO: 39733 - DNA, 15 bp, Homo sapiens
gagcaaaattttgtc

SEQ ID NO: 39734 - DNA, 15 bp, Homo sapiens
agcaaaattttgtca

SEQ ID NO: 39735 - DNA, 15 bp, Homo sapiens
gcaaaattttgtcag

SEQ ID NO: 39736 - DNA, 15 bp, Homo sapiens
caaaattttgtcagc

SEQ ID NO: 39737 - DNA, 15 bp, Homo sapiens
aaaattttgtcagct

SEQ ID NO: 39738 - DNA, 15 bp, Homo sapiens
aaattttgtcagctc

SEQ ID NO: 39739 - DNA, 15 bp, Homo sapiens
aattttgtcagctct

SEQ ID NO: 39740 - DNA, 15 bp, Homo sapiens
attttgtcagctctg

SEQ ID NO: 39741 - DNA, 15 bp, Homo sapiens
ttttgtcagctctgt

SEQ ID NO: 39742 - DNA, 15 bp, Homo sapiens
tttgtcagctctgtc

SEQ ID NO: 39743 - DNA, 15 bp, Homo sapiens
ttgtcagctctgtcc

SEQ ID NO: 39744 - DNA, 15 bp, Homo sapiens
tgtcagctctgtcct

SEQ ID NO: 39745 - DNA, 15 bp, Homo sapiens
gtcagctctgtcctg

SEQ ID NO: 39746 - DNA, 15 bp, Homo sapiens
tcagctctgtcctgg

SEQ ID NO: 39747 - DNA, 15 bp, Homo sapiens
cagctctgtcctggc

SEQ ID NO: 39748 - DNA, 15 bp, Homo sapiens
agctctgtcctggcc

SEQ ID NO: 39749 - DNA, 15 bp, Homo sapiens
gctctgtcctggcct

SEQ ID NO: 39750 - DNA, 15 bp, Homo sapiens
ctctgtcctggcctc

SEQ ID NO: 39751 - DNA, 15 bp, Homo sapiens
tctgtcctggcctct

SEQ ID NO: 39752 - DNA, 15 bp, Homo sapiens
ctgtcctggcctctt

SEQ ID NO: 39753 - DNA, 15 bp, Homo sapiens
tgtcctggcctcttc

SEQ ID NO: 39754 - DNA, 15 bp, Homo sapiens
gtcctggcctcttcc

SEQ ID NO: 39755 - DNA, 15 bp, Homo sapiens
tcctggcctcttcca

SEQ ID NO: 39756 - DNA, 15 bp, Homo sapiens
cctggcctcttccat

SEQ ID NO: 39757 - DNA, 15 bp, Homo sapiens
ctggcctcttccatt

SEQ ID NO: 39758 - DNA, 15 bp, Homo sapiens
tggcctcttccattg

SEQ ID NO: 39759 - DNA, 15 bp, Homo sapiens
ggcctcttccattga

SEQ ID NO: 39760 - DNA, 15 bp, Homo sapiens
gcctcttccattgag

SEQ ID NO: 39761 - DNA, 15 bp, Homo sapiens
cctcttccattgagc

SEQ ID NO: 39762 - DNA, 15 bp, Homo sapiens
ctcttccattgagca

SEQ ID NO: 39763 - DNA, 15 bp, Homo sapiens
tcttccattgagcaa

SEQ ID NO: 39764 - DNA, 15 bp, Homo sapiens
cttccattgagcaag

SEQ ID NO: 39765 - DNA, 15 bp, Homo sapiens
ttccattgagcaagg

SEQ ID NO: 39766 - DNA, 15 bp, Homo sapiens
tccattgagcaaggc

SEQ ID NO: 39767 - DNA, 15 bp, Homo sapiens
ccattgagcaaggca

SEQ ID NO: 39768 - DNA, 15 bp, Homo sapiens
cattgagcaaggcac

SEQ ID NO: 39769 - DNA, 15 bp, Homo sapiens
attgagcaaggcacc

SEQ ID NO: 39770 - DNA, 15 bp, Homo sapiens
ttgagcaaggcacct

SEQ ID NO: 39771 - DNA, 15 bp, Homo sapiens
tgagcaaggcacctt

SEQ ID NO: 39772 - DNA, 15 bp, Homo sapiens
gagcaaggcaccttc

SEQ ID NO: 39773 - DNA, 15 bp, Homo sapiens
agcaaggcaccttca

SEQ ID NO: 39774 - DNA, 15 bp, Homo sapiens
gcaaggcaccttcaa

SEQ ID NO: 39775 - DNA, 15 bp, Homo sapiens
caaggcaccttcaag

SEQ ID NO: 39776 - DNA, 15 bp, Homo sapiens
aaggcaccttcaagt

SEQ ID NO: 39777 - DNA, 15 bp, Homo sapiens
aggcaccttcaagtc

SEQ ID NO: 39778 - DNA, 15 bp, Homo sapiens
ggcaccttcaagtct

SEQ ID NO: 39779 - DNA, 15 bp, Homo sapiens
gcaccttcaagtctt

SEQ ID NO: 39780 - DNA, 15 bp, Homo sapiens
caccttcaagtcttg

SEQ ID NO: 39781 - DNA, 15 bp, Homo sapiens
accttcaagtcttgg

SEQ ID NO: 39782 - DNA, 15 bp, Homo sapiens
ccttcaagtcttggt

SEQ ID NO: 39783 - DNA, 15 bp, Homo sapiens
cttcaagtcttggtg

SEQ ID NO: 39784 - DNA, 15 bp, Homo sapiens
ttcaagtcttggtgt

SEQ ID NO: 39785 - DNA, 15 bp, Homo sapiens
tcaagtcttggtgtt

SEQ ID NO: 39786 - DNA, 15 bp, Homo sapiens
caagtcttggtgttc

SEQ ID NO: 39787 - DNA, 15 bp, Homo sapiens
aagtcttggtgttct

SEQ ID NO: 39788 - DNA, 15 bp, Homo sapiens
agtcttggtgttctg

SEQ ID NO: 39789 - DNA, 15 bp, Homo sapiens
gtcttggtgttctga

SEQ ID NO: 39790 - DNA, 15 bp, Homo sapiens
tcttggtgttctgaa

SEQ ID NO: 39791 - DNA, 15 bp, Homo sapiens
cttggtgttctgaat

SEQ ID NO: 39792 - DNA, 15 bp, Homo sapiens
ttggtgttctgaatg

SEQ ID NO: 39793 - DNA, 15 bp, Homo sapiens
tggtgttctgaatgt

SEQ ID NO: 39794 - DNA, 15 bp, Homo sapiens
ggtgttctgaatgtc

SEQ ID NO: 39795 - DNA, 15 bp, Homo sapiens
gtgttctgaatgtcc

SEQ ID NO: 39796 - DNA, 15 bp, Homo sapiens
tgttctgaatgtcca

SEQ ID NO: 39797 - DNA, 15 bp, Homo sapiens
gttctgaatgtccag

SEQ ID NO: 39798 - DNA, 15 bp, Homo sapiens
ttctgaatgtccaga

SEQ ID NO: 39799 - DNA, 15 bp, Homo sapiens
tctgaatgtccagac

SEQ ID NO: 39800 - DNA, 15 bp, Homo sapiens
ctgaatgtccagaca

SEQ ID NO: 39801 - DNA, 15 bp, Homo sapiens
tgaatgtccagacac

SEQ ID NO: 39802 - DNA, 15 bp, Homo sapiens
gaatgtccagacacc

SEQ ID NO: 39803 - DNA, 15 bp, Homo sapiens
aatgtccagacacct

SEQ ID NO: 39804 - DNA, 15 bp, Homo sapiens
atgtccagacacctt

SEQ ID NO: 39805 - DNA, 15 bp, Homo sapiens
tgtccagacaccttc

SEQ ID NO: 39806 - DNA, 15 bp, Homo sapiens
gtccagacaccttcc

SEQ ID NO: 39807 - DNA, 15 bp, Homo sapiens
tccagacaccttccc

SEQ ID NO: 39808 - DNA, 15 bp, Homo sapiens
ccagacaccttcccg

SEQ ID NO: 39809 - DNA, 15 bp, Homo sapiens
cagacaccttcccga

SEQ ID NO: 39810 - DNA, 15 bp, Homo sapiens
agacaccttcccgaa

SEQ ID NO: 39811 - DNA, 15 bp, Homo sapiens
gacaccttcccgaag

SEQ ID NO: 39812 - DNA, 15 bp, Homo sapiens
acaccttcccgaagt

SEQ ID NO: 39813 - DNA, 15 bp, Homo sapiens
caccttcccgaagtc

SEQ ID NO: 39814 - DNA, 15 bp, Homo sapiens
accttcccgaagtct

SEQ ID NO: 39815 - DNA, 15 bp, Homo sapiens
ccttcccgaagtctt

SEQ ID NO: 39816 - DNA, 15 bp, Homo sapiens
cttcccgaagtcttg

SEQ ID NO: 39817 - DNA, 15 bp, Homo sapiens
ttcccgaagtcttgt

SEQ ID NO: 39818 - DNA, 15 bp, Homo sapiens
tcccgaagtcttgtc

SEQ ID NO: 39819 - DNA, 15 bp, Homo sapiens
cccgaagtcttgtct

SEQ ID NO: 39820 - DNA, 15 bp, Homo sapiens
ccgaagtcttgtctc

SEQ ID NO: 39821 - DNA, 15 bp, Homo sapiens
cgaagtcttgtctct

SEQ ID NO: 39822 - DNA, 15 bp, Homo sapiens
gaagtcttgtctctg

SEQ ID NO: 39823 - DNA, 15 bp, Homo sapiens
aagtcttgtctctgg

SEQ ID NO: 39824 - DNA, 15 bp, Homo sapiens
agtcttgtctctgga

SEQ ID NO: 39825 - DNA, 15 bp, Homo sapiens
gtcttgtctctggac

SEQ ID NO: 39826 - DNA, 15 bp, Homo sapiens
tcttgtctctggaca

SEQ ID NO: 39827 - DNA, 15 bp, Homo sapiens
cttgtctctggacaa

SEQ ID NO: 39828 - DNA, 15 bp, Homo sapiens
ttgtctctggacaag

SEQ ID NO: 39829 - DNA, 15 bp, Homo sapiens
tgtctctggacaaga

SEQ ID NO: 39830 - DNA, 15 bp, Homo sapiens
gtctctggacaagat

SEQ ID NO: 39831 - DNA, 15 bp, Homo sapiens
tctctggacaagatt

SEQ ID NO: 39832 - DNA, 15 bp, Homo sapiens
ctctggacaagattt

SEQ ID NO: 39833 - DNA, 15 bp, Homo sapiens
tctggacaagatttc

SEQ ID NO: 39834 - DNA, 15 bp, Homo sapiens
ctggacaagatttcc

SEQ ID NO: 39835 - DNA, 15 bp, Homo sapiens
tggacaagatttcct

SEQ ID NO: 39836 - DNA, 15 bp, Homo sapiens
ggacaagatttccta

SEQ ID NO: 39837 - DNA, 15 bp, Homo sapiens
gacaagatttcctat

SEQ ID NO: 39838 - DNA, 15 bp, Homo sapiens
acaagatttcctatg

SEQ ID NO: 39839 - DNA, 15 bp, Homo sapiens
caagatttcctatgg

SEQ ID NO: 39840 - DNA, 15 bp, Homo sapiens
aagatttcctatggg

SEQ ID NO: 39841 - DNA, 15 bp, Homo sapiens
agatttcctatgggt

SEQ ID NO: 39842 - DNA, 15 bp, Homo sapiens
gatttcctatgggtc

SEQ ID NO: 39843 - DNA, 15 bp, Homo sapiens
atttcctatgggtcc

SEQ ID NO: 39844 - DNA, 15 bp, Homo sapiens
tttcctatgggtccc

SEQ ID NO: 39845 - DNA, 15 bp, Homo sapiens
ttcctatgggtcccc

SEQ ID NO: 39846 - DNA, 15 bp, Homo sapiens
tcctatgggtcccct

SEQ ID NO: 39847 - DNA, 15 bp, Homo sapiens
cctatgggtcccctt

SEQ ID NO: 39848 - DNA, 15 bp, Homo sapiens
ctatgggtccccttg

SEQ ID NO: 39849 - DNA, 15 bp, Homo sapiens
tatgggtccccttga

SEQ ID NO: 39850 - DNA, 15 bp, Homo sapiens
atgggtccccttgat

SEQ ID NO: 39851 - DNA, 15 bp, Homo sapiens
tgggtccccttgatc

SEQ ID NO: 39852 - DNA, 15 bp, Homo sapiens
gggtccccttgatca

SEQ ID NO: 39853 - DNA, 15 bp, Homo sapiens
ggtccccttgatcat

SEQ ID NO: 39854 - DNA, 15 bp, Homo sapiens
gtccccttgatcatt

SEQ ID NO: 39855 - DNA, 15 bp, Homo sapiens
tccccttgatcattc

SEQ ID NO: 39856 - DNA, 15 bp, Homo sapiens
ccccttgatcattcg

SEQ ID NO: 39857 - DNA, 15 bp, Homo sapiens
cccttgatcattcgg

SEQ ID NO: 39858 - DNA, 15 bp, Homo sapiens
ccttgatcattcggc

SEQ ID NO: 39859 - DNA, 15 bp, Homo sapiens
cttgatcattcggcc

SEQ ID NO: 39860 - DNA, 15 bp, Homo sapiens
ttgatcattcggcct

SEQ ID NO: 39861 - DNA, 15 bp, Homo sapiens
tgatcattcggcctg

SEQ ID NO: 39862 - DNA, 15 bp, Homo sapiens
gatcattcggcctga

SEQ ID NO: 39863 - DNA, 15 bp, Homo sapiens
atcattcggcctgag

SEQ ID NO: 39864 - DNA, 15 bp, Homo sapiens
tcattcggcctgagt

SEQ ID NO: 39865 - DNA, 15 bp, Homo sapiens
cattcggcctgagtt

SEQ ID NO: 39866 - DNA, 15 bp, Homo sapiens
attcggcctgagttt

SEQ ID NO: 39867 - DNA, 15 bp, Homo sapiens
ttcggcctgagtttg

SEQ ID NO: 39868 - DNA, 15 bp, Homo sapiens
tcggcctgagtttgg

SEQ ID NO: 39869 - DNA, 15 bp, Homo sapiens
cggcctgagtttggg

SEQ ID NO: 39870 - DNA, 15 bp, Homo sapiens
ggcctgagtttgggg

SEQ ID NO: 39871 - DNA, 15 bp, Homo sapiens
gcctgagtttggggt

SEQ ID NO: 39872 - DNA, 15 bp, Homo sapiens
cctgagtttggggtt

SEQ ID NO: 39873 - DNA, 15 bp, Homo sapiens
ctgagtttggggttt

SEQ ID NO: 39874 - DNA, 15 bp, Homo sapiens
tgagtttggggtttc

SEQ ID NO: 39875 - DNA, 15 bp, Homo sapiens
gagtttggggtttct

SEQ ID NO: 39876 - DNA, 15 bp, Homo sapiens
agtttggggtttctt

SEQ ID NO: 39877 - DNA, 15 bp, Homo sapiens
gtttggggtttcttt

SEQ ID NO: 39878 - DNA, 15 bp, Homo sapiens
tttggggtttctttt

SEQ ID NO: 39879 - DNA, 15 bp, Homo sapiens
ttggggtttcttttc

SEQ ID NO: 39880 - DNA, 15 bp, Homo sapiens
tggggtttcttttcc

SEQ ID NO: 39881 - DNA, 15 bp, Homo sapiens
ggggtttcttttcct

SEQ ID NO: 39882 - DNA, 15 bp, Homo sapiens
gggtttcttttcctg

SEQ ID NO: 39883 - DNA, 15 bp, Homo sapiens
ggtttcttttcctgt

SEQ ID NO: 39884 - DNA, 15 bp, Homo sapiens
gtttcttttcctgtt

SEQ ID NO: 39885 - DNA, 15 bp, Homo sapiens
tttcttttcctgttc

SEQ ID NO: 39886 - DNA, 15 bp, Homo sapiens
ttcttttcctgttcc

SEQ ID NO: 39887 - DNA, 15 bp, Homo sapiens
tcttttcctgttccc

SEQ ID NO: 39888 - DNA, 15 bp, Homo sapiens
cttttcctgttccct

SEQ ID NO: 39889 - DNA, 15 bp, Homo sapiens
ttttcctgttccctt

SEQ ID NO: 39890 - DNA, 15 bp, Homo sapiens
tttcctgttcccttt

SEQ ID NO: 39891 - DNA, 15 bp, Homo sapiens
ttcctgttccctttt

SEQ ID NO: 39892 - DNA, 15 bp, Homo sapiens
tcctgttcccttttc

SEQ ID NO: 39893 - DNA, 15 bp, Homo sapiens
cctgttcccttttcc

SEQ ID NO: 39894 - DNA, 15 bp, Homo sapiens
ctgttcccttttccc

SEQ ID NO: 39895 - DNA, 15 bp, Homo sapiens
tgttcccttttccct

SEQ ID NO: 39896 - DNA, 15 bp, Homo sapiens
gttcccttttccctt

SEQ ID NO: 39897 - DNA, 15 bp, Homo sapiens
ttcccttttccctta

SEQ ID NO: 39898 - DNA, 15 bp, Homo sapiens
tcccttttcccttac

SEQ ID NO: 39899 - DNA, 15 bp, Homo sapiens
cccttttcccttacc

SEQ ID NO: 39900 - DNA, 15 bp, Homo sapiens
ccttttcccttacca

SEQ ID NO: 39901 - DNA, 15 bp, Homo sapiens
cttttcccttaccaa

SEQ ID NO: 39902 - DNA, 15 bp, Homo sapiens
ttttcccttaccaaa

SEQ ID NO: 39903 - DNA, 15 bp, Homo sapiens
tttcccttaccaaaa

SEQ ID NO: 39904 - DNA, 15 bp, Homo sapiens
ttcccttaccaaaag

SEQ ID NO: 39905 - DNA, 15 bp, Homo sapiens
tcccttaccaaaagt

SEQ ID NO: 39906 - DNA, 15 bp, Homo sapiens
cccttaccaaaagtt

SEQ ID NO: 39907 - DNA, 15 bp, Homo sapiens
ccttaccaaaagttc

SEQ ID NO: 39908 - DNA, 15 bp, Homo sapiens
cttaccaaaagttct

SEQ ID NO: 39909 - DNA, 15 bp, Homo sapiens
ttaccaaaagttctc

SEQ ID NO: 39910 - DNA, 15 bp, Homo sapiens
taccaaaagttctca

SEQ ID NO: 39911 - DNA, 15 bp, Homo sapiens
accaaaagttctcaa

SEQ ID NO: 39912 - DNA, 15 bp, Homo sapiens
ccaaaagttctcaaa

SEQ ID NO: 39913 - DNA, 15 bp, Homo sapiens
caaaagttctcaaaa

SEQ ID NO: 39914 - DNA, 15 bp, Homo sapiens
aaaagttctcaaaag

SEQ ID NO: 39915 - DNA, 15 bp, Homo sapiens
aaagttctcaaaaga

SEQ ID NO: 39916 - DNA, 15 bp, Homo sapiens
aagttctcaaaagat

SEQ ID NO: 39917 - DNA, 15 bp, Homo sapiens
agttctcaaaagata

SEQ ID NO: 39918 - DNA, 15 bp, Homo sapiens
gttctcaaaagataa

SEQ ID NO: 39919 - DNA, 15 bp, Homo sapiens
ttctcaaaagataaa

SEQ ID NO: 39920 - DNA, 15 bp, Homo sapiens
tctcaaaagataaac

SEQ ID NO: 39921 - DNA, 15 bp, Homo sapiens
ctcaaaagataaacc

SEQ ID NO: 39922 - DNA, 15 bp, Homo sapiens
tcaaaagataaaccc

SEQ ID NO: 39923 - DNA, 15 bp, Homo sapiens
caaaagataaaccct

SEQ ID NO: 39924 - DNA, 15 bp, Homo sapiens
aaaagataaaccctg

SEQ ID NO: 39925 - DNA, 15 bp, Homo sapiens
aaagataaaccctgg

SEQ ID NO: 39926 - DNA, 15 bp, Homo sapiens
aagataaaccctggt

SEQ ID NO: 39927 - DNA, 15 bp, Homo sapiens
agataaaccctggtt

SEQ ID NO: 39928 - DNA, 15 bp, Homo sapiens
gataaaccctggttt

SEQ ID NO: 39929 - DNA, 15 bp, Homo sapiens
ataaaccctggtttc

SEQ ID NO: 39930 - DNA, 15 bp, Homo sapiens
taaaccctggtttcc

SEQ ID NO: 39931 - DNA, 15 bp, Homo sapiens
aaaccctggtttcct

SEQ ID NO: 39932 - DNA, 15 bp, Homo sapiens
aaccctggtttcctc

SEQ ID NO: 39933 - DNA, 15 bp, Homo sapiens
accctggtttcctca

SEQ ID NO: 39934 - DNA, 15 bp, Homo sapiens
ccctggtttcctcaa

SEQ ID NO: 39935 - DNA, 15 bp, Homo sapiens
cctggtttcctcaag

SEQ ID NO: 39936 - DNA, 15 bp, Homo sapiens
ctggtttcctcaagt

SEQ ID NO: 39937 - DNA, 15 bp, Homo sapiens
tggtttcctcaagtc

SEQ ID NO: 39938 - DNA, 15 bp, Homo sapiens
ggtttcctcaagtct

SEQ ID NO: 39939 - DNA, 15 bp, Homo sapiens
gtttcctcaagtcta

SEQ ID NO: 39940 - DNA, 15 bp, Homo sapiens
tttcctcaagtctag

SEQ ID NO: 39941 - DNA, 15 bp, Homo sapiens
ttcctcaagtctagt

SEQ ID NO: 39942 - DNA, 15 bp, Homo sapiens
tcctcaagtctagtt

SEQ ID NO: 39943 - DNA, 15 bp, Homo sapiens
cctcaagtctagttt

SEQ ID NO: 39944 - DNA, 15 bp, Homo sapiens
ctcaagtctagtttc

SEQ ID NO: 39945 - DNA, 15 bp, Homo sapiens
tcaagtctagtttca

SEQ ID NO: 39946 - DNA, 15 bp, Homo sapiens
caagtctagtttcaa

SEQ ID NO: 39947 - DNA, 15 bp, Homo sapiens
aagtctagtttcaaa

SEQ ID NO: 39948 - DNA, 15 bp, Homo sapiens
agtctagtttcaaag

SEQ ID NO: 39949 - DNA, 15 bp, Homo sapiens
gtctagtttcaaagc

SEQ ID NO: 39950 - DNA, 15 bp, Homo sapiens
tctagtttcaaagca

SEQ ID NO: 39951 - DNA, 15 bp, Homo sapiens
ctagtttcaaagcaa

SEQ ID NO: 39952 - DNA, 15 bp, Homo sapiens
tagtttcaaagcaat

SEQ ID NO: 39953 - DNA, 15 bp, Homo sapiens
agtttcaaagcaata

SEQ ID NO: 39954 - DNA, 15 bp, Homo sapiens
gtttcaaagcaataa

SEQ ID NO: 39955 - DNA, 15 bp, Homo sapiens
tttcaaagcaataag

SEQ ID NO: 39956 - DNA, 15 bp, Homo sapiens
ttcaaagcaataagt

SEQ ID NO: 39957 - DNA, 15 bp, Homo sapiens
tcaaagcaataagtg

SEQ ID NO: 39958 - DNA, 15 bp, Homo sapiens
caaagcaataagtgt

SEQ ID NO: 39959 - DNA, 15 bp, Homo sapiens
aaagcaataagtgtt

SEQ ID NO: 39960 - DNA, 15 bp, Homo sapiens
aagcaataagtgttc

SEQ ID NO: 39961 - DNA, 15 bp, Homo sapiens
agcaataagtgttca

SEQ ID NO: 39962 - DNA, 15 bp, Homo sapiens
gcaataagtgttcag

SEQ ID NO: 39963 - DNA, 15 bp, Homo sapiens
caataagtgttcagg

SEQ ID NO: 39964 - DNA, 15 bp, Homo sapiens
aataagtgttcaggt

SEQ ID NO: 39965 - DNA, 15 bp, Homo sapiens
ataagtgttcaggta

SEQ ID NO: 39966 - DNA, 15 bp, Homo sapiens
taagtgttcaggtag

SEQ ID NO: 39967 - DNA, 15 bp, Homo sapiens
aagtgttcaggtagc

SEQ ID NO: 39968 - DNA, 15 bp, Homo sapiens
agtgttcaggtagca

SEQ ID NO: 39969 - DNA, 15 bp, Homo sapiens
gtgttcaggtagcaa

SEQ ID NO: 39970 - DNA, 15 bp, Homo sapiens
tgttcaggtagcaaa

SEQ ID NO: 39971 - DNA, 15 bp, Homo sapiens
gttcaggtagcaaac

SEQ ID NO: 39972 - DNA, 15 bp, Homo sapiens
ttcaggtagcaaaca

SEQ ID NO: 39973 - DNA, 15 bp, Homo sapiens
tcaggtagcaaacat

SEQ ID NO: 39974 - DNA, 15 bp, Homo sapiens
caggtagcaaacatc

SEQ ID NO: 39975 - DNA, 15 bp, Homo sapiens
aggtagcaaacatct

SEQ ID NO: 39976 - DNA, 15 bp, Homo sapiens
ggtagcaaacatctt

SEQ ID NO: 39977 - DNA, 15 bp, Homo sapiens
gtagcaaacatcttc

SEQ ID NO: 39978 - DNA, 15 bp, Homo sapiens
tagcaaacatcttct

SEQ ID NO: 39979 - DNA, 15 bp, Homo sapiens
agcaaacatcttcta

SEQ ID NO: 39980 - DNA, 15 bp, Homo sapiens
gcaaacatcttctat

SEQ ID NO: 39981 - DNA, 15 bp, Homo sapiens
caaacatcttctatc

SEQ ID NO: 39982 - DNA, 15 bp, Homo sapiens
aaacatcttctatct

SEQ ID NO: 39983 - DNA, 15 bp, Homo sapiens
aacatcttctatctc

SEQ ID NO: 39984 - DNA, 15 bp, Homo sapiens
acatcttctatctca

SEQ ID NO: 39985 - DNA, 15 bp, Homo sapiens
catcttctatctcat

SEQ ID NO: 39986 - DNA, 15 bp, Homo sapiens
atcttctatctcatt

SEQ ID NO: 39987 - DNA, 15 bp, Homo sapiens
tcttctatctcattg

SEQ ID NO: 39988 - DNA, 15 bp, Homo sapiens
cttctatctcattgc

SEQ ID NO: 39989 - DNA, 15 bp, Homo sapiens
ttctatctcattgca

SEQ ID NO: 39990 - DNA, 15 bp, Homo sapiens
tctatctcattgcat

SEQ ID NO: 39991 - DNA, 15 bp, Homo sapiens
ctatctcattgcatc

SEQ ID NO: 39992 - DNA, 15 bp, Homo sapiens
tatctcattgcatca

SEQ ID NO: 39993 - DNA, 15 bp, Homo sapiens
atctcattgcatcaa

SEQ ID NO: 39994 - DNA, 15 bp, Homo sapiens
tctcattgcatcaat

SEQ ID NO: 39995 - DNA, 15 bp, Homo sapiens
ctcattgcatcaatc

SEQ ID NO: 39996 - DNA, 15 bp, Homo sapiens
tcattgcatcaatct

SEQ ID NO: 39997 - DNA, 15 bp, Homo sapiens
cattgcatcaatctc

SEQ ID NO: 39998 - DNA, 15 bp, Homo sapiens
attgcatcaatctca

SEQ ID NO: 39999 - DNA, 15 bp, Homo sapiens
ttgcatcaatctcat

SEQ ID NO: 40000 - DNA, 15 bp, Homo sapiens
tgcatcaatctcatg

SEQ ID NO: 40001 - DNA, 15 bp, Homo sapiens
gcatcaatctcatga

SEQ ID NO: 40002 - DNA, 15 bp, Homo sapiens
catcaatctcatgat

SEQ ID NO: 40003 - DNA, 15 bp, Homo sapiens
atcaatctcatgatc

SEQ ID NO: 40004 - DNA, 15 bp, Homo sapiens
tcaatctcatgatca

SEQ ID NO: 40005 - DNA, 15 bp, Homo sapiens
caatctcatgatcac

SEQ ID NO: 40006 - DNA, 15 bp, Homo sapiens
aatctcatgatcaca

SEQ ID NO: 40007 - DNA, 15 bp, Homo sapiens
atctcatgatcacaa

SEQ ID NO: 40008 - DNA, 15 bp, Homo sapiens
tctcatgatcacaaa

SEQ ID NO: 40009 - DNA, 15 bp, Homo sapiens
ctcatgatcacaaat

SEQ ID NO: 40010 - DNA, 15 bp, Homo sapiens
tcatgatcacaaatg

SEQ ID NO: 40011 - DNA, 15 bp, Homo sapiens
catgatcacaaatgc

SEQ ID NO: 40012 - DNA, 15 bp, Homo sapiens
atgatcacaaatgcc

SEQ ID NO: 40013 - DNA, 15 bp, Homo sapiens
tgatcacaaatgcca

SEQ ID NO: 40014 - DNA, 15 bp, Homo sapiens
gatcacaaatgccac

SEQ ID NO: 40015 - DNA, 15 bp, Homo sapiens
atcacaaatgccaca

SEQ ID NO: 40016 - DNA, 15 bp, Homo sapiens
tcacaaatgccacat

SEQ ID NO: 40017 - DNA, 15 bp, Homo sapiens
cacaaatgccacatt

SEQ ID NO: 40018 - DNA, 15 bp, Homo sapiens
acaaatgccacattt

SEQ ID NO: 40019 - DNA, 15 bp, Homo sapiens
caaatgccacatttg

SEQ ID NO: 40020 - DNA, 15 bp, Homo sapiens
aaatgccacatttgg

SEQ ID NO: 40021 - DNA, 15 bp, Homo sapiens
aatgccacatttggc

SEQ ID NO: 40022 - DNA, 15 bp, Homo sapiens
atgccacatttggct

SEQ ID NO: 40023 - DNA, 15 bp, Homo sapiens
tgccacatttggctc

SEQ ID NO: 40024 - DNA, 15 bp, Homo sapiens
gccacatttggctcc

SEQ ID NO: 40025 - DNA, 15 bp, Homo sapiens
ccacatttggctccc

SEQ ID NO: 40026 - DNA, 15 bp, Homo sapiens
cacatttggctccca

SEQ ID NO: 40027 - DNA, 15 bp, Homo sapiens
acatttggctcccaa

SEQ ID NO: 40028 - DNA, 15 bp, Homo sapiens
catttggctcccaac

SEQ ID NO: 40029 - DNA, 15 bp, Homo sapiens
atttggctcccaacc

SEQ ID NO: 40030 - DNA, 15 bp, Homo sapiens
tttggctcccaacct

SEQ ID NO: 40031 - DNA, 15 bp, Homo sapiens
ttggctcccaacctg

SEQ ID NO: 40032 - DNA, 15 bp, Homo sapiens
tggctcccaacctgc

SEQ ID NO: 40033 - DNA, 15 bp, Homo sapiens
ggctcccaacctgct

SEQ ID NO: 40034 - DNA, 15 bp, Homo sapiens
gctcccaacctgctc

SEQ ID NO: 40035 - DNA, 15 bp, Homo sapiens
ctcccaacctgctcc

SEQ ID NO: 40036 - DNA, 15 bp, Homo sapiens
tcccaacctgctcca

SEQ ID NO: 40037 - DNA, 15 bp, Homo sapiens
cccaacctgctccag

SEQ ID NO: 40038 - DNA, 15 bp, Homo sapiens
ccaacctgctccagg

SEQ ID NO: 40039 - DNA, 15 bp, Homo sapiens
caacctgctccaggc

SEQ ID NO: 40040 - DNA, 15 bp, Homo sapiens
aacctgctccaggct

SEQ ID NO: 40041 - DNA, 15 bp, Homo sapiens
acctgctccaggcta

SEQ ID NO: 40042 - DNA, 15 bp, Homo sapiens
cctgctccaggctaa

SEQ ID NO: 40043 - DNA, 15 bp, Homo sapiens
ctgctccaggctaat

SEQ ID NO: 40044 - DNA, 15 bp, Homo sapiens
tgctccaggctaatc

SEQ ID NO: 40045 - DNA, 15 bp, Homo sapiens
gctccaggctaatcc

SEQ ID NO: 40046 - DNA, 15 bp, Homo sapiens
ctccaggctaatcca

SEQ ID NO: 40047 - DNA, 15 bp, Homo sapiens
tccaggctaatccaa

SEQ ID NO: 40048 - DNA, 15 bp, Homo sapiens
ccaggctaatccaat

SEQ ID NO: 40049 - DNA, 15 bp, Homo sapiens
caggctaatccaatt

SEQ ID NO: 40050 - DNA, 15 bp, Homo sapiens
aggctaatccaattt

SEQ ID NO: 40051 - DNA, 15 bp, Homo sapiens
ggctaatccaatttt

SEQ ID NO: 40052 - DNA, 15 bp, Homo sapiens
gctaatccaatttta

SEQ ID NO: 40053 - DNA, 15 bp, Homo sapiens
ctaatccaattttat

SEQ ID NO: 40054 - DNA, 15 bp, Homo sapiens
taatccaattttatg

SEQ ID NO: 40055 - DNA, 15 bp, Homo sapiens
aatccaattttatgc

SEQ ID NO: 40056 - DNA, 15 bp, Homo sapiens
atccaattttatgca

SEQ ID NO: 40057 - DNA, 15 bp, Homo sapiens
tccaattttatgcaa

SEQ ID NO: 40058 - DNA, 15 bp, Homo sapiens
ccaattttatgcaaa

SEQ ID NO: 40059 - DNA, 15 bp, Homo sapiens
caattttatgcaaaa

SEQ ID NO: 40060 - DNA, 15 bp, Homo sapiens
aattttatgcaaaat

SEQ ID NO: 40061 - DNA, 15 bp, Homo sapiens
attttatgcaaaatt

SEQ ID NO: 40062 - DNA, 15 bp, Homo sapiens
ttttatgcaaaatta

SEQ ID NO: 40063 - DNA, 15 bp, Homo sapiens
tttatgcaaaattat

SEQ ID NO: 40064 - DNA, 15 bp, Homo sapiens
ttatgcaaaattatc

SEQ ID NO: 40065 - DNA, 15 bp, Homo sapiens
tatgcaaaattatcc

SEQ ID NO: 40066 - DNA, 15 bp, Homo sapiens
atgcaaaattatcca

SEQ ID NO: 40067 - DNA, 15 bp, Homo sapiens
tgcaaaattatccag

SEQ ID NO: 40068 - DNA, 15 bp, Homo sapiens
gcaaaattatccaga

SEQ ID NO: 40069 - DNA, 15 bp, Homo sapiens
caaaattatccagag

SEQ ID NO: 40070 - DNA, 15 bp, Homo sapiens
aaaattatccagagg

SEQ ID NO: 40071 - DNA, 15 bp, Homo sapiens
aaattatccagaggt

SEQ ID NO: 40072 - DNA, 15 bp, Homo sapiens
aattatccagaggtg

SEQ ID NO: 40073 - DNA, 15 bp, Homo sapiens
attatccagaggtgg

SEQ ID NO: 40074 - DNA, 15 bp, Homo sapiens
ttatccagaggtggg

SEQ ID NO: 40075 - DNA, 15 bp, Homo sapiens
tatccagaggtggga

SEQ ID NO: 40076 - DNA, 15 bp, Homo sapiens
atccagaggtgggat

SEQ ID NO: 40077 - DNA, 15 bp, Homo sapiens
tccagaggtgggatg

SEQ ID NO: 40078 - DNA, 15 bp, Homo sapiens
ccagaggtgggatgg

SEQ ID NO: 40079 - DNA, 15 bp, Homo sapiens
cagaggtgggatggt

SEQ ID NO: 40080 - DNA, 15 bp, Homo sapiens
agaggtgggatggtg

SEQ ID NO: 40081 - DNA, 15 bp, Homo sapiens
gaggtgggatggtgg

SEQ ID NO: 40082 - DNA, 15 bp, Homo sapiens
aggtgggatggtggg

SEQ ID NO: 40083 - DNA, 15 bp, Homo sapiens
ggtgggatggtgggc

SEQ ID NO: 40084 - DNA, 15 bp, Homo sapiens
gtgggatggtgggca

SEQ ID NO: 40085 - DNA, 15 bp, Homo sapiens
tgggatggtgggcat

SEQ ID NO: 40086 - DNA, 15 bp, Homo sapiens
gggatggtgggcata

SEQ ID NO: 40087 - DNA, 15 bp, Homo sapiens
ggatggtgggcataa

SEQ ID NO: 40088 - DNA, 15 bp, Homo sapiens
gatggtgggcataag

SEQ ID NO: 40089 - DNA, 15 bp, Homo sapiens
atggtgggcataagt

SEQ ID NO: 40090 - DNA, 15 bp, Homo sapiens
tggtgggcataagtc

SEQ ID NO: 40091 - DNA, 15 bp, Homo sapiens
ggtgggcataagtcg

SEQ ID NO: 40092 - DNA, 15 bp, Homo sapiens
gtgggcataagtcgg

SEQ ID NO: 40093 - DNA, 15 bp, Homo sapiens
tgggcataagtcggc

SEQ ID NO: 40094 - DNA, 15 bp, Homo sapiens
gggcataagtcggct

SEQ ID NO: 40095 - DNA, 15 bp, Homo sapiens
ggcataagtcggctt

SEQ ID NO: 40096 - DNA, 15 bp, Homo sapiens
gcataagtcggcttg

SEQ ID NO: 40097 - DNA, 15 bp, Homo sapiens
cataagtcggcttga

SEQ ID NO: 40098 - DNA, 15 bp, Homo sapiens
ataagtcggcttgag

SEQ ID NO: 40099 - DNA, 15 bp, Homo sapiens
taagtcggcttgagt

SEQ ID NO: 40100 - DNA, 15 bp, Homo sapiens
aagtcggcttgagtg

SEQ ID NO: 40101 - DNA, 15 bp, Homo sapiens
agtcggcttgagtgt

SEQ ID NO: 40102 - DNA, 15 bp, Homo sapiens
gtcggcttgagtgtg

SEQ ID NO: 40103 - DNA, 15 bp, Homo sapiens
tcggcttgagtgtgg

SEQ ID NO: 40104 - DNA, 15 bp, Homo sapiens
cggcttgagtgtggt

SEQ ID NO: 40105 - DNA, 15 bp, Homo sapiens
ggcttgagtgtggtc

SEQ ID NO: 40106 - DNA, 15 bp, Homo sapiens
gcttgagtgtggtcc

SEQ ID NO: 40107 - DNA, 15 bp, Homo sapiens
cttgagtgtggtcct

SEQ ID NO: 40108 - DNA, 15 bp, Homo sapiens
ttgagtgtggtcctc

SEQ ID NO: 40109 - DNA, 15 bp, Homo sapiens
tgagtgtggtcctcc

SEQ ID NO: 40110 - DNA, 15 bp, Homo sapiens
gagtgtggtcctcca

SEQ ID NO: 40111 - DNA, 15 bp, Homo sapiens
agtgtggtcctccag

SEQ ID NO: 40112 - DNA, 15 bp, Homo sapiens
gtgtggtcctccagt

SEQ ID NO: 40113 - DNA, 15 bp, Homo sapiens
tgtggtcctccagtc

SEQ ID NO: 40114 - DNA, 15 bp, Homo sapiens
gtggtcctccagtcg

SEQ ID NO: 40115 - DNA, 15 bp, Homo sapiens
tggtcctccagtcga

SEQ ID NO: 40116 - DNA, 15 bp, Homo sapiens
ggtcctccagtcgag

SEQ ID NO: 40117 - DNA, 15 bp, Homo sapiens
gtcctccagtcgaga

SEQ ID NO: 40118 - DNA, 15 bp, Homo sapiens
tcctccagtcgagaa

SEQ ID NO: 40119 - DNA, 15 bp, Homo sapiens
cctccagtcgagaac

SEQ ID NO: 40120 - DNA, 15 bp, Homo sapiens
ctccagtcgagaacc

SEQ ID NO: 40121 - DNA, 15 bp, Homo sapiens
tccagtcgagaacct

SEQ ID NO: 40122 - DNA, 15 bp, Homo sapiens
ccagtcgagaacctc

SEQ ID NO: 40123 - DNA, 15 bp, Homo sapiens
cagtcgagaacctct

SEQ ID NO: 40124 - DNA, 15 bp, Homo sapiens
agtcgagaacctctt

SEQ ID NO: 40125 - DNA, 15 bp, Homo sapiens
gtcgagaacctcttg

SEQ ID NO: 40126 - DNA, 15 bp, Homo sapiens
tcgagaacctcttga

SEQ ID NO: 40127 - DNA, 15 bp, Homo sapiens
cgagaacctcttgag

SEQ ID NO: 40128 - DNA, 15 bp, Homo sapiens
gagaacctcttgagc

SEQ ID NO: 40129 - DNA, 15 bp, Homo sapiens
agaacctcttgagca

SEQ ID NO: 40130 - DNA, 15 bp, Homo sapiens
gaacctcttgagcac

SEQ ID NO: 40131 - DNA, 15 bp, Homo sapiens
aacctcttgagcaca

SEQ ID NO: 40132 - DNA, 15 bp, Homo sapiens
acctcttgagcacag

SEQ ID NO: 40133 - DNA, 15 bp, Homo sapiens
ctcttgagcacagtt

SEQ ID NO: 40134 - DNA, 15 bp, Homo sapiens
tcttgagcacagtta

SEQ ID NO: 40135 - DNA, 15 bp, Homo sapiens
cttgagcacagttag

SEQ ID NO: 40136 - DNA, 15 bp, Homo sapiens
ttgagcacagttaga

SEQ ID NO: 40137 - DNA, 15 bp, Homo sapiens
tgagcacagttagat

SEQ ID NO: 40138 - DNA, 15 bp, Homo sapiens
gagcacagttagata

SEQ ID NO: 40139 - DNA, 15 bp, Homo sapiens
agcacagttagataa

SEQ ID NO: 40140 - DNA, 15 bp, Homo sapiens
gcacagttagataat

SEQ ID NO: 40141 - DNA, 15 bp, Homo sapiens
cacagttagataatg

SEQ ID NO: 40142 - DNA, 15 bp, Homo sapiens
acagttagataatgt

SEQ ID NO: 40143 - DNA, 15 bp, Homo sapiens
cagttagataatgta

SEQ ID NO: 40144 - DNA, 15 bp, Homo sapiens
agttagataatgtag

SEQ ID NO: 40145 - DNA, 15 bp, Homo sapiens
gttagataatgtagg

SEQ ID NO: 40146 - DNA, 15 bp, Homo sapiens
ttagataatgtaggc

SEQ ID NO: 40147 - DNA, 15 bp, Homo sapiens
tagataatgtaggca

SEQ ID NO: 40148 - DNA, 15 bp, Homo sapiens
agataatgtaggcac

SEQ ID NO: 40149 - DNA, 15 bp, Homo sapiens
gataatgtaggcact

SEQ ID NO: 40150 - DNA, 15 bp, Homo sapiens
ataatgtaggcactt

SEQ ID NO: 40151 - DNA, 15 bp, Homo sapiens
taatgtaggcactta

SEQ ID NO: 40152 - DNA, 15 bp, Homo sapiens
aatgtaggcacttaa

SEQ ID NO: 40153 - DNA, 15 bp, Homo sapiens
atgtaggcacttaaa

SEQ ID NO: 40154 - DNA, 15 bp, Homo sapiens
tgtaggcacttaaag

SEQ ID NO: 40155 - DNA, 15 bp, Homo sapiens
gtaggcacttaaagc

SEQ ID NO: 40156 - DNA, 15 bp, Homo sapiens
taggcacttaaagca

SEQ ID NO: 40157 - DNA, 15 bp, Homo sapiens
aggcacttaaagcac

SEQ ID NO: 40158 - DNA, 15 bp, Homo sapiens
ggcacttaaagcacg

SEQ ID NO: 40159 - DNA, 15 bp, Homo sapiens
gcacttaaagcacga

SEQ ID NO: 40160 - DNA, 15 bp, Homo sapiens
cacttaaagcacgag

SEQ ID NO: 40161 - DNA, 15 bp, Homo sapiens
acttaaagcacgagg

SEQ ID NO: 40162 - DNA, 15 bp, Homo sapiens
cttaaagcacgaggt

SEQ ID NO: 40163 - DNA, 15 bp, Homo sapiens
ttaaagcacgaggtc

SEQ ID NO: 40164 - DNA, 15 bp, Homo sapiens
taaagcacgaggtcc

SEQ ID NO: 40165 - DNA, 15 bp, Homo sapiens
aaagcacgaggtcca

SEQ ID NO: 40166 - DNA, 15 bp, Homo sapiens
aagcacgaggtccaa

SEQ ID NO: 40167 - DNA, 15 bp, Homo sapiens
agcacgaggtccaag

SEQ ID NO: 40168 - DNA, 15 bp, Homo sapiens
gcacgaggtccaagc

SEQ ID NO: 40169 - DNA, 15 bp, Homo sapiens
cacgaggtccaagca

SEQ ID NO: 40170 - DNA, 15 bp, Homo sapiens
acgaggtccaagcag

SEQ ID NO: 40171 - DNA, 15 bp, Homo sapiens
cgaggtccaagcagc

SEQ ID NO: 40172 - DNA, 15 bp, Homo sapiens
gaggtccaagcagct

SEQ ID NO: 40173 - DNA, 15 bp, Homo sapiens
aggtccaagcagctt

SEQ ID NO: 40174 - DNA, 15 bp, Homo sapiens
ggtccaagcagcttg

SEQ ID NO: 40175 - DNA, 15 bp, Homo sapiens
gtccaagcagcttga

SEQ ID NO: 40176 - DNA, 15 bp, Homo sapiens
tccaagcagcttgac

SEQ ID NO: 40177 - DNA, 15 bp, Homo sapiens
ccaagcagcttgaca

SEQ ID NO: 40178 - DNA, 15 bp, Homo sapiens
caagcagcttgacac

SEQ ID NO: 40179 - DNA, 15 bp, Homo sapiens
aagcagcttgacaca

SEQ ID NO: 40180 - DNA, 15 bp, Homo sapiens
agcagcttgacacat

SEQ ID NO: 40181 - DNA, 15 bp, Homo sapiens
gcagcttgacacatg

SEQ ID NO: 40182 - DNA, 15 bp, Homo sapiens
cagcttgacacatgt

SEQ ID NO: 40183 - DNA, 15 bp, Homo sapiens
agcttgacacatgtc

SEQ ID NO: 40184 - DNA, 15 bp, Homo sapiens
gcttgacacatgtca

SEQ ID NO: 40185 - DNA, 15 bp, Homo sapiens
cttgacacatgtcat

SEQ ID NO: 40186 - DNA, 15 bp, Homo sapiens
ttgacacatgtcatt

SEQ ID NO: 40187 - DNA, 15 bp, Homo sapiens
tgacacatgtcattc

SEQ ID NO: 40188 - DNA, 15 bp, Homo sapiens
gacacatgtcattcc

SEQ ID NO: 40189 - DNA, 15 bp, Homo sapiens
acacatgtcattcca

SEQ ID NO: 40190 - DNA, 15 bp, Homo sapiens
cacatgtcattccag

SEQ ID NO: 40191 - DNA, 15 bp, Homo sapiens
acatgtcattccaga

SEQ ID NO: 40192 - DNA, 15 bp, Homo sapiens
catgtcattccagag

SEQ ID NO: 40193 - DNA, 15 bp, Homo sapiens
atgtcattccagagc

SEQ ID NO: 40194 - DNA, 15 bp, Homo sapiens
tgtcattccagagcc

SEQ ID NO: 40195 - DNA, 15 bp, Homo sapiens
gtcattccagagcca

SEQ ID NO: 40196 - DNA, 15 bp, Homo sapiens
tcattccagagccac

SEQ ID NO: 40197 - DNA, 15 bp, Homo sapiens
cattccagagccacc

SEQ ID NO: 40198 - DNA, 15 bp, Homo sapiens
attccagagccacct

SEQ ID NO: 40199 - DNA, 15 bp, Homo sapiens
ttccagagccacctc

SEQ ID NO: 40200 - DNA, 15 bp, Homo sapiens
tccagagccacctct

SEQ ID NO: 40201 - DNA, 15 bp, Homo sapiens
ccagagccacctctg

SEQ ID NO: 40202 - DNA, 15 bp, Homo sapiens
cagagccacctctga

SEQ ID NO: 40203 - DNA, 15 bp, Homo sapiens
agagccacctctgaa

SEQ ID NO: 40204 - DNA, 15 bp, Homo sapiens
gagccacctctgaag

SEQ ID NO: 40205 - DNA, 15 bp, Homo sapiens
agccacctctgaagg

SEQ ID NO: 40206 - DNA, 15 bp, Homo sapiens
gccacctctgaaggg

SEQ ID NO: 40207 - DNA, 15 bp, Homo sapiens
ccacctctgaagggt

SEQ ID NO: 40208 - DNA, 15 bp, Homo sapiens
cacctctgaagggtc

SEQ ID NO: 40209 - DNA, 15 bp, Homo sapiens
acctctgaagggtcc

SEQ ID NO: 40210 - DNA, 15 bp, Homo sapiens
cctctgaagggtcct

SEQ ID NO: 40211 - DNA, 15 bp, Homo sapiens
ctctgaagggtcctt

SEQ ID NO: 40212 - DNA, 15 bp, Homo sapiens
tctgaagggtccttc

SEQ ID NO: 40213 - DNA, 15 bp, Homo sapiens
ctgaagggtccttca

SEQ ID NO: 40214 - DNA, 15 bp, Homo sapiens
tgaagggtccttcag

SEQ ID NO: 40215 - DNA, 15 bp, Homo sapiens
gaagggtccttcaga

SEQ ID NO: 40216 - DNA, 15 bp, Homo sapiens
aagggtccttcagag

SEQ ID NO: 40217 - DNA, 15 bp, Homo sapiens
agggtccttcagagg

SEQ ID NO: 40218 - DNA, 15 bp, Homo sapiens
gggtccttcagaggc

SEQ ID NO: 40219 - DNA, 15 bp, Homo sapiens
ggtccttcagaggcc

SEQ ID NO: 40220 - DNA, 15 bp, Homo sapiens
gtccttcagaggcct

SEQ ID NO: 40221 - DNA, 15 bp, Homo sapiens
tccttcagaggcctt

SEQ ID NO: 40222 - DNA, 15 bp, Homo sapiens
ccttcagaggccttc

SEQ ID NO: 40223 - DNA, 15 bp, Homo sapiens
cttcagaggccttcg

SEQ ID NO: 40224 - DNA, 15 bp, Homo sapiens
ttcagaggccttcgt

SEQ ID NO: 40225 - DNA, 15 bp, Homo sapiens
tcagaggccttcgtt

SEQ ID NO: 40226 - DNA, 15 bp, Homo sapiens
cagaggccttcgttt

SEQ ID NO: 40227 - DNA, 15 bp, Homo sapiens
agaggccttcgtttt

SEQ ID NO: 40228 - DNA, 15 bp, Homo sapiens
gaggccttcgttttg

SEQ ID NO: 40229 - DNA, 15 bp, Homo sapiens
aggccttcgttttgg

SEQ ID NO: 40230 - DNA, 15 bp, Homo sapiens
ggccttcgttttgga

SEQ ID NO: 40231 - DNA, 15 bp, Homo sapiens
gccttcgttttggaa

SEQ ID NO: 40232 - DNA, 15 bp, Homo sapiens
ccttcgttttggaat

SEQ ID NO: 40233 - DNA, 15 bp, Homo sapiens
cttcgttttggaatg

SEQ ID NO: 40234 - DNA, 15 bp, Homo sapiens
ttcgttttggaatgt

SEQ ID NO: 40235 - DNA, 15 bp, Homo sapiens
tcgttttggaatgtc

SEQ ID NO: 40236 - DNA, 15 bp, Homo sapiens
cgttttggaatgtct

SEQ ID NO: 40237 - DNA, 15 bp, Homo sapiens
gttttggaatgtctc

SEQ ID NO: 40238 - DNA, 15 bp, Homo sapiens
ttttggaatgtctca

SEQ ID NO: 40239 - DNA, 15 bp, Homo sapiens
tttggaatgtctcaa

SEQ ID NO: 40240 - DNA, 15 bp, Homo sapiens
ttggaatgtctcaaa

SEQ ID NO: 40241 - DNA, 15 bp, Homo sapiens
tggaatgtctcaaat

SEQ ID NO: 40242 - DNA, 15 bp, Homo sapiens
ggaatgtctcaaata

SEQ ID NO: 40243 - DNA, 15 bp, Homo sapiens
gaatgtctcaaatac

SEQ ID NO: 40244 - DNA, 15 bp, Homo sapiens
aatgtctcaaatacc

SEQ ID NO: 40245 - DNA, 15 bp, Homo sapiens
atgtctcaaatacca

SEQ ID NO: 40246 - DNA, 15 bp, Homo sapiens
tgtctcaaataccat

SEQ ID NO: 40247 - DNA, 15 bp, Homo sapiens
gtctcaaataccatg

SEQ ID NO: 40248 - DNA, 15 bp, Homo sapiens
tctcaaataccatgc

SEQ ID NO: 40249 - DNA, 15 bp, Homo sapiens
ctcaaataccatgcc

SEQ ID NO: 40250 - DNA, 15 bp, Homo sapiens
tcaaataccatgccc

SEQ ID NO: 40251 - DNA, 15 bp, Homo sapiens
caaataccatgcccc

SEQ ID NO: 40252 - DNA, 15 bp, Homo sapiens
aaataccatgcccca

SEQ ID NO: 40253 - DNA, 15 bp, Homo sapiens
aataccatgccccac

SEQ ID NO: 40254 - DNA, 15 bp, Homo sapiens
ataccatgccccacc

SEQ ID NO: 40255 - DNA, 15 bp, Homo sapiens
taccatgccccacct

SEQ ID NO: 40256 - DNA, 15 bp, Homo sapiens
accatgccccacctc

SEQ ID NO: 40257 - DNA, 15 bp, Homo sapiens
ccatgccccacctcc

SEQ ID NO: 40258 - DNA, 15 bp, Homo sapiens
catgccccacctcca

SEQ ID NO: 40259 - DNA, 15 bp, Homo sapiens
atgccccacctccac

SEQ ID NO: 40260 - DNA, 15 bp, Homo sapiens
tgccccacctccacc

SEQ ID NO: 40261 - DNA, 15 bp, Homo sapiens
gccccacctccacct

SEQ ID NO: 40262 - DNA, 15 bp, Homo sapiens
ccccacctccaccta

SEQ ID NO: 40263 - DNA, 15 bp, Homo sapiens
cccacctccacctag

SEQ ID NO: 40264 - DNA, 15 bp, Homo sapiens
ccacctccacctaga

SEQ ID NO: 40265 - DNA, 15 bp, Homo sapiens
cacctccacctagac

SEQ ID NO: 40266 - DNA, 15 bp, Homo sapiens
acctccacctagacc

SEQ ID NO: 40267 - DNA, 15 bp, Homo sapiens
cctccacctagacct

SEQ ID NO: 40268 - DNA, 15 bp, Homo sapiens
ctccacctagacctt

SEQ ID NO: 40269 - DNA, 15 bp, Homo sapiens
tccacctagaccttg

SEQ ID NO: 40270 - DNA, 15 bp, Homo sapiens
ccacctagaccttgg

SEQ ID NO: 40271 - DNA, 15 bp, Homo sapiens
cacctagaccttggg

SEQ ID NO: 40272 - DNA, 15 bp, Homo sapiens
acctagaccttggga

SEQ ID NO: 40273 - DNA, 15 bp, Homo sapiens
cctagaccttgggat

SEQ ID NO: 40274 - DNA, 15 bp, Homo sapiens
ctagaccttgggatg

SEQ ID NO: 40275 - DNA, 15 bp, Homo sapiens
tagaccttgggatgg

SEQ ID NO: 40276 - DNA, 15 bp, Homo sapiens
agaccttgggatggc

SEQ ID NO: 40277 - DNA, 15 bp, Homo sapiens
gaccttgggatggcc

SEQ ID NO: 40278 - DNA, 15 bp, Homo sapiens
accttgggatggcca

SEQ ID NO: 40279 - DNA, 15 bp, Homo sapiens
ccttgggatggccac

SEQ ID NO: 40280 - DNA, 15 bp, Homo sapiens
cttgggatggccact

SEQ ID NO: 40281 - DNA, 15 bp, Homo sapiens
ttgggatggccactc

SEQ ID NO: 40282 - DNA, 15 bp, Homo sapiens
tgggatggccactca

SEQ ID NO: 40283 - DNA, 15 bp, Homo sapiens
gggatggccactcag

SEQ ID NO: 40284 - DNA, 15 bp, Homo sapiens
ggatggccactcaga

SEQ ID NO: 40285 - DNA, 15 bp, Homo sapiens
gatggccactcagaa

SEQ ID NO: 40286 - DNA, 15 bp, Homo sapiens
atggccactcagaaa

SEQ ID NO: 40287 - DNA, 15 bp, Homo sapiens
tggccactcagaaat

SEQ ID NO: 40288 - DNA, 15 bp, Homo sapiens
ggccactcagaaatt

SEQ ID NO: 40289 - DNA, 15 bp, Homo sapiens
gccactcagaaattc

SEQ ID NO: 40290 - DNA, 15 bp, Homo sapiens
ccactcagaaattcc

SEQ ID NO: 40291 - DNA, 15 bp, Homo sapiens
cactcagaaattcct

SEQ ID NO: 40292 - DNA, 15 bp, Homo sapiens
actcagaaattcctc

SEQ ID NO: 40293 - DNA, 15 bp, Homo sapiens
ctcagaaattcctcc

SEQ ID NO: 40294 - DNA, 15 bp, Homo sapiens
tcagaaattcctccc

SEQ ID NO: 40295 - DNA, 15 bp, Homo sapiens
cagaaattcctcccg

SEQ ID NO: 40296 - DNA, 15 bp, Homo sapiens
agaaattcctcccgc

SEQ ID NO: 40297 - DNA, 15 bp, Homo sapiens
gaaattcctcccgca

SEQ ID NO: 40298 - DNA, 15 bp, Homo sapiens
aaattcctcccgcac

SEQ ID NO: 40299 - DNA, 15 bp, Homo sapiens
aattcctcccgcact

SEQ ID NO: 40300 - DNA, 15 bp, Homo sapiens
attcctcccgcactg

SEQ ID NO: 40301 - DNA, 15 bp, Homo sapiens
ttcctcccgcactgc

SEQ ID NO: 40302 - DNA, 15 bp, Homo sapiens
tcctcccgcactgcc

SEQ ID NO: 40303 - DNA, 15 bp, Homo sapiens
cctcccgcactgccg

SEQ ID NO: 40304 - DNA, 15 bp, Homo sapiens
ctcccgcactgccgg

SEQ ID NO: 40305 - DNA, 15 bp, Homo sapiens
tcccgcactgccggt

SEQ ID NO: 40306 - DNA, 15 bp, Homo sapiens
cccgcactgccggta

SEQ ID NO: 40307 - DNA, 15 bp, Homo sapiens
ccgcactgccggtaa

SEQ ID NO: 40308 - DNA, 15 bp, Homo sapiens
cgcactgccggtaaa

SEQ ID NO: 40309 - DNA, 15 bp, Homo sapiens
gcactgccggtaaat

SEQ ID NO: 40310 - DNA, 15 bp, Homo sapiens
cactgccggtaaatg

SEQ ID NO: 40311 - DNA, 15 bp, Homo sapiens
actgccggtaaatgc

SEQ ID NO: 40312 - DNA, 15 bp, Homo sapiens
ctgccggtaaatgca

SEQ ID NO: 40313 - DNA, 15 bp, Homo sapiens
tgccggtaaatgcaa

SEQ ID NO: 40314 - DNA, 15 bp, Homo sapiens
gccggtaaatgcaat

SEQ ID NO: 40315 - DNA, 15 bp, Homo sapiens
ccggtaaatgcaatg

SEQ ID NO: 40316 - DNA, 15 bp, Homo sapiens
cggtaaatgcaatgc

SEQ ID NO: 40317 - DNA, 15 bp, Homo sapiens
ggtaaatgcaatgcc

SEQ ID NO: 40318 - DNA, 15 bp, Homo sapiens
gtaaatgcaatgcca

SEQ ID NO: 40319 - DNA, 15 bp, Homo sapiens
taaatgcaatgccaa

SEQ ID NO: 40320 - DNA, 15 bp, Homo sapiens
aaatgcaatgccaac

SEQ ID NO: 40321 - DNA, 15 bp, Homo sapiens
aatgcaatgccaact

SEQ ID NO: 40322 - DNA, 15 bp, Homo sapiens
atgcaatgccaactc

SEQ ID NO: 40323 - DNA, 15 bp, Homo sapiens
tgcaatgccaactcc

SEQ ID NO: 40324 - DNA, 15 bp, Homo sapiens
gcaatgccaactcca

SEQ ID NO: 40325 - DNA, 15 bp, Homo sapiens
caatgccaactccac

SEQ ID NO: 40326 - DNA, 15 bp, Homo sapiens
aatgccaactccaca

SEQ ID NO: 40327 - DNA, 15 bp, Homo sapiens
atgccaactccacat

SEQ ID NO: 40328 - DNA, 15 bp, Homo sapiens
tgccaactccacata

SEQ ID NO: 40329 - DNA, 15 bp, Homo sapiens
gccaactccacatag

SEQ ID NO: 40330 - DNA, 15 bp, Homo sapiens
ccaactccacatagc

SEQ ID NO: 40331 - DNA, 15 bp, Homo sapiens
caactccacatagcc

SEQ ID NO: 40332 - DNA, 15 bp, Homo sapiens
aactccacatagcct

SEQ ID NO: 40333 - DNA, 15 bp, Homo sapiens
actccacatagcctc

SEQ ID NO: 40334 - DNA, 15 bp, Homo sapiens
ctccacatagcctcc

SEQ ID NO: 40335 - DNA, 15 bp, Homo sapiens
tccacatagcctcca

SEQ ID NO: 40336 - DNA, 15 bp, Homo sapiens
ccacatagcctccat

SEQ ID NO: 40337 - DNA, 15 bp, Homo sapiens
cacatagcctccatt

SEQ ID NO: 40338 - DNA, 15 bp, Homo sapiens
acatagcctccattt

SEQ ID NO: 40339 - DNA, 15 bp, Homo sapiens
catagcctccatttg

SEQ ID NO: 40340 - DNA, 15 bp, Homo sapiens
atagcctccatttgg

SEQ ID NO: 40341 - DNA, 15 bp, Homo sapiens
tagcctccatttggc

SEQ ID NO: 40342 - DNA, 15 bp, Homo sapiens
agcctccatttggct

SEQ ID NO: 40343 - DNA, 15 bp, Homo sapiens
gcctccatttggctg

SEQ ID NO: 40344 - DNA, 15 bp, Homo sapiens
cctccatttggctgt

SEQ ID NO: 40345 - DNA, 15 bp, Homo sapiens
ctccatttggctgtt

SEQ ID NO: 40346 - DNA, 15 bp, Homo sapiens
tccatttggctgttc

SEQ ID NO: 40347 - DNA, 15 bp, Homo sapiens
ccatttggctgttca

SEQ ID NO: 40348 - DNA, 15 bp, Homo sapiens
catttggctgttcag

SEQ ID NO: 40349 - DNA, 15 bp, Homo sapiens
atttggctgttcagt

SEQ ID NO: 40350 - DNA, 15 bp, Homo sapiens
tttggctgttcagtc

SEQ ID NO: 40351 - DNA, 15 bp, Homo sapiens
ttggctgttcagtct

SEQ ID NO: 40352 - DNA, 15 bp, Homo sapiens
tggctgttcagtctc

SEQ ID NO: 40353 - DNA, 15 bp, Homo sapiens
ggctgttcagtctca

SEQ ID NO: 40354 - DNA, 15 bp, Homo sapiens
gctgttcagtctcat

SEQ ID NO: 40355 - DNA, 15 bp, Homo sapiens
ctgttcagtctcatg

SEQ ID NO: 40356 - DNA, 15 bp, Homo sapiens
tgttcagtctcatgt

SEQ ID NO: 40357 - DNA, 15 bp, Homo sapiens
gttcagtctcatgtc

SEQ ID NO: 40358 - DNA, 15 bp, Homo sapiens
ttcagtctcatgtca

SEQ ID NO: 40359 - DNA, 15 bp, Homo sapiens
tcagtctcatgtcac

SEQ ID NO: 40360 - DNA, 15 bp, Homo sapiens
cagtctcatgtcact

SEQ ID NO: 40361 - DNA, 15 bp, Homo sapiens
agtctcatgtcactg

SEQ ID NO: 40362 - DNA, 15 bp, Homo sapiens
gtctcatgtcactgg

SEQ ID NO: 40363 - DNA, 15 bp, Homo sapiens
tctcatgtcactggc

SEQ ID NO: 40364 - DNA, 15 bp, Homo sapiens
ctcatgtcactggca

SEQ ID NO: 40365 - DNA, 15 bp, Homo sapiens
tcatgtcactggcaa

SEQ ID NO: 40366 - DNA, 15 bp, Homo sapiens
catgtcactggcaat

SEQ ID NO: 40367 - DNA, 15 bp, Homo sapiens
atgtcactggcaatg

SEQ ID NO: 40368 - DNA, 15 bp, Homo sapiens
tgtcactggcaatgt

SEQ ID NO: 40369 - DNA, 15 bp, Homo sapiens
gtcactggcaatgtg

SEQ ID NO: 40370 - DNA, 15 bp, Homo sapiens
tcactggcaatgtgg

SEQ ID NO: 40371 - DNA, 15 bp, Homo sapiens
cactggcaatgtgga

SEQ ID NO: 40372 - DNA, 15 bp, Homo sapiens
actggcaatgtggat

SEQ ID NO: 40373 - DNA, 15 bp, Homo sapiens
ctggcaatgtggatt

SEQ ID NO: 40374 - DNA, 15 bp, Homo sapiens
tggcaatgtggattc

SEQ ID NO: 40375 - DNA, 15 bp, Homo sapiens
ggcaatgtggattcc

SEQ ID NO: 40376 - DNA, 15 bp, Homo sapiens
gcaatgtggattcct

SEQ ID NO: 40377 - DNA, 15 bp, Homo sapiens
caatgtggattcctg

SEQ ID NO: 40378 - DNA, 15 bp, Homo sapiens
aatgtggattcctgt

SEQ ID NO: 40379 - DNA, 15 bp, Homo sapiens
atgtggattcctgtt

SEQ ID NO: 40380 - DNA, 15 bp, Homo sapiens
tgtggattcctgttc

SEQ ID NO: 40381 - DNA, 15 bp, Homo sapiens
gtggattcctgttct

SEQ ID NO: 40382 - DNA, 15 bp, Homo sapiens
tggattcctgttctg

SEQ ID NO: 40383 - DNA, 15 bp, Homo sapiens
ggattcctgttctga

SEQ ID NO: 40384 - DNA, 15 bp, Homo sapiens
gattcctgttctgat

SEQ ID NO: 40385 - DNA, 15 bp, Homo sapiens
attcctgttctgatc

SEQ ID NO: 40386 - DNA, 15 bp, Homo sapiens
ttcctgttctgatct

SEQ ID NO: 40387 - DNA, 15 bp, Homo sapiens
cctgttctgatctag

SEQ ID NO: 40388 - DNA, 15 bp, Homo sapiens
ctgttctgatctagg

SEQ ID NO: 40389 - DNA, 15 bp, Homo sapiens
tgttctgatctaggt

SEQ ID NO: 40390 - DNA, 15 bp, Homo sapiens
gttctgatctaggtg

SEQ ID NO: 40391 - DNA, 15 bp, Homo sapiens
ttctgatctaggtgt

SEQ ID NO: 40392 - DNA, 15 bp, Homo sapiens
tctgatctaggtgtt

SEQ ID NO: 40393 - DNA, 15 bp, Homo sapiens
ctgatctaggtgttt

SEQ ID NO: 40394 - DNA, 15 bp, Homo sapiens
tgatctaggtgtttc

SEQ ID NO: 40395 - DNA, 15 bp, Homo sapiens
gatctaggtgtttct

SEQ ID NO: 40396 - DNA, 15 bp, Homo sapiens
atctaggtgtttctg

SEQ ID NO: 40397 - DNA, 15 bp, Homo sapiens
tctaggtgtttctgg

SEQ ID NO: 40398 - DNA, 15 bp, Homo sapiens
ctaggtgtttctggg

SEQ ID NO: 40399 - DNA, 15 bp, Homo sapiens
taggtgtttctgggt

SEQ ID NO: 40400 - DNA, 15 bp, Homo sapiens
aggtgtttctgggtt

SEQ ID NO: 40401 - DNA, 15 bp, Homo sapiens
ggtgtttctgggttg

SEQ ID NO: 40402 - DNA, 15 bp, Homo sapiens
gtgtttctgggttga

SEQ ID NO: 40403 - DNA, 15 bp, Homo sapiens
tgtttctgggttgat

SEQ ID NO: 40404 - DNA, 15 bp, Homo sapiens
gtttctgggttgata

SEQ ID NO: 40405 - DNA, 15 bp, Homo sapiens
tttctgggttgatac

SEQ ID NO: 40406 - DNA, 15 bp, Homo sapiens
ttctgggttgataca

SEQ ID NO: 40407 - DNA, 15 bp, Homo sapiens
tctgggttgatacag

SEQ ID NO: 40408 - DNA, 15 bp, Homo sapiens
ctgggttgatacagg

SEQ ID NO: 40409 - DNA, 15 bp, Homo sapiens
tgggttgatacaggg

SEQ ID NO: 40410 - DNA, 15 bp, Homo sapiens
gggttgatacagggc

SEQ ID NO: 40411 - DNA, 15 bp, Homo sapiens
ggttgatacagggct

SEQ ID NO: 40412 - DNA, 15 bp, Homo sapiens
gttgatacagggctc

SEQ ID NO: 40413 - DNA, 15 bp, Homo sapiens
ttgatacagggctct

SEQ ID NO: 40414 - DNA, 15 bp, Homo sapiens
tgatacagggctcta

SEQ ID NO: 40415 - DNA, 15 bp, Homo sapiens
gatacagggctctac

SEQ ID NO: 40416 - DNA, 15 bp, Homo sapiens
atacagggctctacc

SEQ ID NO: 40417 - DNA, 15 bp, Homo sapiens
tacagggctctacct

SEQ ID NO: 40418 - DNA, 15 bp, Homo sapiens
acagggctctacctt

SEQ ID NO: 40419 - DNA, 15 bp, Homo sapiens
cagggctctaccttt

SEQ ID NO: 40420 - DNA, 15 bp, Homo sapiens
agggctctacctttt

SEQ ID NO: 40421 - DNA, 15 bp, Homo sapiens
gggctctaccttttg

SEQ ID NO: 40422 - DNA, 15 bp, Homo sapiens
ggctctaccttttgc

SEQ ID NO: 40423 - DNA, 15 bp, Homo sapiens
gctctaccttttgct

SEQ ID NO: 40424 - DNA, 15 bp, Homo sapiens
ctctaccttttgctt

SEQ ID NO: 40425 - DNA, 15 bp, Homo sapiens
tctaccttttgctta

SEQ ID NO: 40426 - DNA, 15 bp, Homo sapiens
ctaccttttgcttac

SEQ ID NO: 40427 - DNA, 15 bp, Homo sapiens
taccttttgcttaca

SEQ ID NO: 40428 - DNA, 15 bp, Homo sapiens
accttttgcttacaa

SEQ ID NO: 40429 - DNA, 15 bp, Homo sapiens
ccttttgcttacaag

SEQ ID NO: 40430 - DNA, 15 bp, Homo sapiens
cttttgcttacaaga

SEQ ID NO: 40431 - DNA, 15 bp, Homo sapiens
ttttgcttacaagac

SEQ ID NO: 40432 - DNA, 15 bp, Homo sapiens
tttgcttacaagaca

SEQ ID NO: 40433 - DNA, 15 bp, Homo sapiens
ttgcttacaagacat

SEQ ID NO: 40434 - DNA, 15 bp, Homo sapiens
tgcttacaagacatt

SEQ ID NO: 40435 - DNA, 15 bp, Homo sapiens
gcttacaagacattg

SEQ ID NO: 40436 - DNA, 15 bp, Homo sapiens
cttacaagacattgt

SEQ ID NO: 40437 - DNA, 15 bp, Homo sapiens
ttacaagacattgtt

SEQ ID NO: 40438 - DNA, 15 bp, Homo sapiens
tacaagacattgtta

SEQ ID NO: 40439 - DNA, 15 bp, Homo sapiens
acaagacattgttaa

SEQ ID NO: 40440 - DNA, 15 bp, Homo sapiens
caagacattgttaag

SEQ ID NO: 40441 - DNA, 15 bp, Homo sapiens
aagacattgttaagc

SEQ ID NO: 40442 - DNA, 15 bp, Homo sapiens
agacattgttaagcc

SEQ ID NO: 40443 - DNA, 15 bp, Homo sapiens
gacattgttaagcct

SEQ ID NO: 40444 - DNA, 15 bp, Homo sapiens
acattgttaagcctc

SEQ ID NO: 40445 - DNA, 15 bp, Homo sapiens
cattgttaagcctca

SEQ ID NO: 40446 - DNA, 15 bp, Homo sapiens
attgttaagcctcac

SEQ ID NO: 40447 - DNA, 15 bp, Homo sapiens
ttgttaagcctcacc

SEQ ID NO: 40448 - DNA, 15 bp, Homo sapiens
tgttaagcctcacca

SEQ ID NO: 40449 - DNA, 15 bp, Homo sapiens
gttaagcctcaccat

SEQ ID NO: 40450 - DNA, 15 bp, Homo sapiens
ttaagcctcaccatg

SEQ ID NO: 40451 - DNA, 15 bp, Homo sapiens
taagcctcaccatga

SEQ ID NO: 40452 - DNA, 15 bp, Homo sapiens
aagcctcaccatgag

SEQ ID NO: 40453 - DNA, 15 bp, Homo sapiens
agcctcaccatgagt

SEQ ID NO: 40454 - DNA, 15 bp, Homo sapiens
gcctcaccatgagtt

SEQ ID NO: 40455 - DNA, 15 bp, Homo sapiens
cctcaccatgagttt

SEQ ID NO: 40456 - DNA, 15 bp, Homo sapiens
ctcaccatgagtttt

SEQ ID NO: 40457 - DNA, 15 bp, Homo sapiens
tcaccatgagttttt

SEQ ID NO: 40458 - DNA, 15 bp, Homo sapiens
caccatgagtttttt

SEQ ID NO: 40459 - DNA, 15 bp, Homo sapiens
accatgagttttttt

SEQ ID NO: 40460 - DNA, 15 bp, Homo sapiens
ccatgagtttttttt

SEQ ID NO: 40461 - DNA, 15 bp, Homo sapiens
catgagtttttttta

SEQ ID NO: 40462 - DNA, 15 bp, Homo sapiens
atgagttttttttaa

SEQ ID NO: 40463 - DNA, 15 bp, Homo sapiens
tgagttttttttaag

SEQ ID NO: 40464 - DNA, 15 bp, Homo sapiens
gagttttttttaagc

SEQ ID NO: 40465 - DNA, 15 bp, Homo sapiens
agttttttttaagct

SEQ ID NO: 40466 - DNA, 15 bp, Homo sapiens
gttttttttaagctt

SEQ ID NO: 40467 - DNA, 15 bp, Homo sapiens
ttttttttaagctta

SEQ ID NO: 40468 - DNA, 15 bp, Homo sapiens
tttttttaagcttag

SEQ ID NO: 40469 - DNA, 15 bp, Homo sapiens
ttttttaagcttagc

SEQ ID NO: 40470 - DNA, 15 bp, Homo sapiens
tttttaagcttagcc

SEQ ID NO: 40471 - DNA, 15 bp, Homo sapiens
ttttaagcttagcca

SEQ ID NO: 40472 - DNA, 15 bp, Homo sapiens
tttaagcttagccat

SEQ ID NO: 40473 - DNA, 15 bp, Homo sapiens
ttaagcttagccatg

SEQ ID NO: 40474 - DNA, 15 bp, Homo sapiens
taagcttagccatga

SEQ ID NO: 40475 - DNA, 15 bp, Homo sapiens
aagcttagccatgat

SEQ ID NO: 40476 - DNA, 15 bp, Homo sapiens
agcttagccatgatt

SEQ ID NO: 40477 - DNA, 15 bp, Homo sapiens
gcttagccatgattt

SEQ ID NO: 40478 - DNA, 15 bp, Homo sapiens
cttagccatgattta

SEQ ID NO: 40479 - DNA, 15 bp, Homo sapiens
ttagccatgatttac

SEQ ID NO: 40480 - DNA, 15 bp, Homo sapiens
tagccatgatttacc

SEQ ID NO: 40481 - DNA, 15 bp, Homo sapiens
agccatgatttaccc

SEQ ID NO: 40482 - DNA, 15 bp, Homo sapiens
gccatgatttaccca

SEQ ID NO: 40483 - DNA, 15 bp, Homo sapiens
ccatgatttacccaa

SEQ ID NO: 40484 - DNA, 15 bp, Homo sapiens
catgatttacccaaa

SEQ ID NO: 40485 - DNA, 15 bp, Homo sapiens
atgatttacccaaat

SEQ ID NO: 40486 - DNA, 15 bp, Homo sapiens
tgatttacccaaatg

SEQ ID NO: 40487 - DNA, 15 bp, Homo sapiens
gatttacccaaatgt

SEQ ID NO: 40488 - DNA, 15 bp, Homo sapiens
atttacccaaatgtt

SEQ ID NO: 40489 - DNA, 15 bp, Homo sapiens
tttacccaaatgttc

SEQ ID NO: 40490 - DNA, 15 bp, Homo sapiens
ttacccaaatgttca

SEQ ID NO: 40491 - DNA, 15 bp, Homo sapiens
tacccaaatgttcac

SEQ ID NO: 40492 - DNA, 15 bp, Homo sapiens
acccaaatgttcact

SEQ ID NO: 40493 - DNA, 15 bp, Homo sapiens
cccaaatgttcactc

SEQ ID NO: 40494 - DNA, 15 bp, Homo sapiens
ccaaatgttcactcc

SEQ ID NO: 40495 - DNA, 15 bp, Homo sapiens
caaatgttcactcct

SEQ ID NO: 40496 - DNA, 15 bp, Homo sapiens
aaatgttcactcctc

SEQ ID NO: 40497 - DNA, 15 bp, Homo sapiens
aatgttcactcctca

SEQ ID NO: 40498 - DNA, 15 bp, Homo sapiens
atgttcactcctcat

SEQ ID NO: 40499 - DNA, 15 bp, Homo sapiens
tgttcactcctcata

SEQ ID NO: 40500 - DNA, 15 bp, Homo sapiens
gttcactcctcataa

SEQ ID NO: 40501 - DNA, 15 bp, Homo sapiens
ttcactcctcataaa

SEQ ID NO: 40502 - DNA, 15 bp, Homo sapiens
tcactcctcataaaa

SEQ ID NO: 40503 - DNA, 15 bp, Homo sapiens
cactcctcataaaaa

SEQ ID NO: 40504 - DNA, 15 bp, Homo sapiens
actcctcataaaaaa

SEQ ID NO: 40505 - DNA, 15 bp, Homo sapiens
ctcctcataaaaaat

SEQ ID NO: 40506 - DNA, 15 bp, Homo sapiens
tcctcataaaaaata

SEQ ID NO: 40507 - DNA, 15 bp, Homo sapiens
cctcataaaaaataa

SEQ ID NO: 40508 - DNA, 15 bp, Homo sapiens
ctcataaaaaataat

SEQ ID NO: 40509 - DNA, 15 bp, Homo sapiens
tcataaaaaataatc

SEQ ID NO: 40510 - DNA, 15 bp, Homo sapiens
cataaaaaataatct

SEQ ID NO: 40511 - DNA, 15 bp, Homo sapiens
ataaaaaataatctt

SEQ ID NO: 40512 - DNA, 15 bp, Homo sapiens
taaaaaataatcttc

SEQ ID NO: 40513 - DNA, 15 bp, Homo sapiens
aaaaaataatcttca

SEQ ID NO: 40514 - DNA, 15 bp, Homo sapiens
aaaaataatcttcat

SEQ ID NO: 40515 - DNA, 15 bp, Homo sapiens
aaaataatcttcatt

SEQ ID NO: 40516 - DNA, 15 bp, Homo sapiens
aaataatcttcattt

SEQ ID NO: 40517 - DNA, 15 bp, Homo sapiens
aataatcttcatttt

SEQ ID NO: 40518 - DNA, 15 bp, Homo sapiens
ataatcttcattttg

SEQ ID NO: 40519 - DNA, 15 bp, Homo sapiens
taatcttcattttgg

SEQ ID NO: 40520 - DNA, 15 bp, Homo sapiens
aatcttcattttggg

SEQ ID NO: 40521 - DNA, 15 bp, Homo sapiens
atcttcattttgggg

SEQ ID NO: 40522 - DNA, 15 bp, Homo sapiens
tcttcattttggggt

SEQ ID NO: 40523 - DNA, 15 bp, Homo sapiens
cttcattttggggtt

SEQ ID NO: 40524 - DNA, 15 bp, Homo sapiens
ttcattttggggtta

SEQ ID NO: 40525 - DNA, 15 bp, Homo sapiens
tcattttggggttat

SEQ ID NO: 40526 - DNA, 15 bp, Homo sapiens
cattttggggttatt

SEQ ID NO: 40527 - DNA, 15 bp, Homo sapiens
attttggggttattt

SEQ ID NO: 40528 - DNA, 15 bp, Homo sapiens
ttttggggttatttt

SEQ ID NO: 40529 - DNA, 15 bp, Homo sapiens
tttggggttattttt

SEQ ID NO: 40530 - DNA, 15 bp, Homo sapiens
ttggggttatttttt

SEQ ID NO: 40531 - DNA, 15 bp, Homo sapiens
tggggttattttttg

SEQ ID NO: 40532 - DNA, 15 bp, Homo sapiens
ggggttattttttgt

SEQ ID NO: 40533 - DNA, 15 bp, Homo sapiens
gggttattttttgtt

SEQ ID NO: 40534 - DNA, 15 bp, Homo sapiens
ggttattttttgttg

SEQ ID NO: 40535 - DNA, 15 bp, Homo sapiens
gttattttttgttgt

SEQ ID NO: 40536 - DNA, 15 bp, Homo sapiens
ttattttttgttgtt

SEQ ID NO: 40537 - DNA, 15 bp, Homo sapiens
tattttttgttgttt

SEQ ID NO: 40538 - DNA, 15 bp, Homo sapiens
attttttgttgtttt

SEQ ID NO: 40539 - DNA, 15 bp, Homo sapiens
ttttttgttgttttc

SEQ ID NO: 40540 - DNA, 15 bp, Homo sapiens
tttttgttgttttct

SEQ ID NO: 40541 - DNA, 15 bp, Homo sapiens
ttttgttgttttctg

SEQ ID NO: 40542 - DNA, 15 bp, Homo sapiens
tttgttgttttctgt

SEQ ID NO: 40543 - DNA, 15 bp, Homo sapiens
ttgttgttttctgtt

SEQ ID NO: 40544 - DNA, 15 bp, Homo sapiens
tgttgttttctgttc

SEQ ID NO: 40545 - DNA, 15 bp, Homo sapiens
gttgttttctgttct

SEQ ID NO: 40546 - DNA, 15 bp, Homo sapiens
ttgttttctgttcta

SEQ ID NO: 40547 - DNA, 15 bp, Homo sapiens
tgttttctgttctaa

SEQ ID NO: 40548 - DNA, 15 bp, Homo sapiens
gttttctgttctaaa

SEQ ID NO: 40549 - DNA, 15 bp, Homo sapiens
ttttctgttctaaaa

SEQ ID NO: 40550 - DNA, 15 bp, Homo sapiens
tttctgttctaaaaa

SEQ ID NO: 40551 - DNA, 15 bp, Homo sapiens
ttctgttctaaaaaa

SEQ ID NO: 40552 - DNA, 15 bp, Homo sapiens
tctgttctaaaaaaa

SEQ ID NO: 40553 - DNA, 15 bp, Homo sapiens
ctgttctaaaaaaaa

SEQ ID NO: 40554 - DNA, 15 bp, Homo sapiens
tgttctaaaaaaaaa

SEQ ID NO: 40555 - DNA, 15 bp, Homo sapiens
gttctaaaaaaaaat

SEQ ID NO: 40556 - DNA, 15 bp, Homo sapiens
ttctaaaaaaaaatc

SEQ ID NO: 40557 - DNA, 15 bp, Homo sapiens
tctaaaaaaaaatca

SEQ ID NO: 40558 - DNA, 15 bp, Homo sapiens
ctaaaaaaaaatcac

SEQ ID NO: 40559 - DNA, 15 bp, Homo sapiens
taaaaaaaaatcact

SEQ ID NO: 40560 - DNA, 15 bp, Homo sapiens
aaaaaaaaatcactg

SEQ ID NO: 40561 - DNA, 15 bp, Homo sapiens
aaaaaaaatcactgt

SEQ ID NO: 40562 - DNA, 15 bp, Homo sapiens
aaaaaaatcactgtt

SEQ ID NO: 40563 - DNA, 15 bp, Homo sapiens
aaaaaatcactgttc

SEQ ID NO: 40564 - DNA, 15 bp, Homo sapiens
aaaaatcactgttct

SEQ ID NO: 40565 - DNA, 15 bp, Homo sapiens
aaaatcactgttctc

SEQ ID NO: 40566 - DNA, 15 bp, Homo sapiens
aaatcactgttctcc

SEQ ID NO: 40567 - DNA, 15 bp, Homo sapiens
aatcactgttctcca

SEQ ID NO: 40568 - DNA, 15 bp, Homo sapiens
atcactgttctccat

SEQ ID NO: 40569 - DNA, 15 bp, Homo sapiens
tcactgttctccatg

SEQ ID NO: 40570 - DNA, 15 bp, Homo sapiens
cactgttctccatgc

SEQ ID NO: 40571 - DNA, 15 bp, Homo sapiens
actgttctccatgct

SEQ ID NO: 40572 - DNA, 15 bp, Homo sapiens
ctgttctccatgctt

SEQ ID NO: 40573 - DNA, 15 bp, Homo sapiens
tgttctccatgctta

SEQ ID NO: 40574 - DNA, 15 bp, Homo sapiens
gttctccatgcttat

SEQ ID NO: 40575 - DNA, 15 bp, Homo sapiens
ttctccatgcttata

SEQ ID NO: 40576 - DNA, 15 bp, Homo sapiens
tctccatgcttatac

SEQ ID NO: 40577 - DNA, 15 bp, Homo sapiens
ctccatgcttatacg

SEQ ID NO: 40578 - DNA, 15 bp, Homo sapiens
tccatgcttatacga

SEQ ID NO: 40579 - DNA, 15 bp, Homo sapiens
ccatgcttatacgag

SEQ ID NO: 40580 - DNA, 15 bp, Homo sapiens
catgcttatacgagt

SEQ ID NO: 40581 - DNA, 15 bp, Homo sapiens
atgcttatacgagtg

SEQ ID NO: 40582 - DNA, 15 bp, Homo sapiens
tgcttatacgagtgt

SEQ ID NO: 40583 - DNA, 15 bp, Homo sapiens
gcttatacgagtgtc

SEQ ID NO: 40584 - DNA, 15 bp, Homo sapiens
cttatacgagtgtca

SEQ ID NO: 40585 - DNA, 15 bp, Homo sapiens
ttatacgagtgtcat

SEQ ID NO: 40586 - DNA, 15 bp, Homo sapiens
tatacgagtgtcatg

SEQ ID NO: 40587 - DNA, 15 bp, Homo sapiens
atacgagtgtcatga

SEQ ID NO: 40588 - DNA, 15 bp, Homo sapiens
tacgagtgtcatgat

SEQ ID NO: 40589 - DNA, 15 bp, Homo sapiens
acgagtgtcatgatg

SEQ ID NO: 40590 - DNA, 15 bp, Homo sapiens
cgagtgtcatgatgt

SEQ ID NO: 40591 - DNA, 15 bp, Homo sapiens
gagtgtcatgatgtg

SEQ ID NO: 40592 - DNA, 15 bp, Homo sapiens
agtgtcatgatgtga

SEQ ID NO: 40593 - DNA, 15 bp, Homo sapiens
gtgtcatgatgtgac

SEQ ID NO: 40594 - DNA, 15 bp, Homo sapiens
tgtcatgatgtgaca

SEQ ID NO: 40595 - DNA, 15 bp, Homo sapiens
gtcatgatgtgacac

SEQ ID NO: 40596 - DNA, 15 bp, Homo sapiens
tcatgatgtgacaca

SEQ ID NO: 40597 - DNA, 15 bp, Homo sapiens
catgatgtgacacaa

SEQ ID NO: 40598 - DNA, 15 bp, Homo sapiens
atgatgtgacacaat

SEQ ID NO: 40599 - DNA, 15 bp, Homo sapiens
tgatgtgacacaatg

SEQ ID NO: 40600 - DNA, 15 bp, Homo sapiens
gatgtgacacaatgt

SEQ ID NO: 40601 - DNA, 15 bp, Homo sapiens
atgtgacacaatgtg

SEQ ID NO: 40602 - DNA, 15 bp, Homo sapiens
tgtgacacaatgtgt

SEQ ID NO: 40603 - DNA, 15 bp, Homo sapiens
gtgacacaatgtgtt

SEQ ID NO: 40604 - DNA, 15 bp, Homo sapiens
tgacacaatgtgttc

SEQ ID NO: 40605 - DNA, 15 bp, Homo sapiens
gacacaatgtgttca

SEQ ID NO: 40606 - DNA, 15 bp, Homo sapiens
acacaatgtgttcac

SEQ ID NO: 40607 - DNA, 15 bp, Homo sapiens
cacaatgtgttcact

SEQ ID NO: 40608 - DNA, 15 bp, Homo sapiens
acaatgtgttcactt

SEQ ID NO: 40609 - DNA, 15 bp, Homo sapiens
caatgtgttcacttg

SEQ ID NO: 40610 - DNA, 15 bp, Homo sapiens
aatgtgttcacttgt

SEQ ID NO: 40611 - DNA, 15 bp, Homo sapiens
atgtgttcacttgtt

SEQ ID NO: 40612 - DNA, 15 bp, Homo sapiens
tgtgttcacttgttc

SEQ ID NO: 40613 - DNA, 15 bp, Homo sapiens
gtgttcacttgttca

SEQ ID NO: 40614 - DNA, 15 bp, Homo sapiens
tgttcacttgttcac

SEQ ID NO: 40615 - DNA, 15 bp, Homo sapiens
gttcacttgttcaca

SEQ ID NO: 40616 - DNA, 15 bp, Homo sapiens
ttcacttgttcacag

SEQ ID NO: 40617 - DNA, 15 bp, Homo sapiens
tcacttgttcacagc

SEQ ID NO: 40618 - DNA, 15 bp, Homo sapiens
cacttgttcacagca

SEQ ID NO: 40619 - DNA, 15 bp, Homo sapiens
acttgttcacagcag

SEQ ID NO: 40620 - DNA, 15 bp, Homo sapiens
cttgttcacagcagt

SEQ ID NO: 40621 - DNA, 15 bp, Homo sapiens
ttgttcacagcagtg

SEQ ID NO: 40622 - DNA, 15 bp, Homo sapiens
tgttcacagcagtgg

SEQ ID NO: 40623 - DNA, 15 bp, Homo sapiens
gttcacagcagtggt

SEQ ID NO: 40624 - DNA, 15 bp, Homo sapiens
ttcacagcagtggta

SEQ ID NO: 40625 - DNA, 15 bp, Homo sapiens
tcacagcagtggtaa

SEQ ID NO: 40626 - DNA, 15 bp, Homo sapiens
cacagcagtggtaaa

SEQ ID NO: 40627 - DNA, 15 bp, Homo sapiens
acagcagtggtaaaa

SEQ ID NO: 40628 - DNA, 15 bp, Homo sapiens
cagcagtggtaaaat

SEQ ID NO: 40629 - DNA, 15 bp, Homo sapiens
agcagtggtaaaata

SEQ ID NO: 40630 - DNA, 15 bp, Homo sapiens
gcagtggtaaaatat

SEQ ID NO: 40631 - DNA, 15 bp, Homo sapiens
cagtggtaaaatatt

SEQ ID NO: 40632 - DNA, 15 bp, Homo sapiens
agtggtaaaatattt

SEQ ID NO: 40633 - DNA, 15 bp, Homo sapiens
gtggtaaaatatttc

SEQ ID NO: 40634 - DNA, 15 bp, Homo sapiens
tggtaaaatatttca

SEQ ID NO: 40635 - DNA, 15 bp, Homo sapiens
ggtaaaatatttcag

SEQ ID NO: 40636 - DNA, 15 bp, Homo sapiens
gtaaaatatttcaga

SEQ ID NO: 40637 - DNA, 15 bp, Homo sapiens
taaaatatttcagaa

SEQ ID NO: 40638 - DNA, 15 bp, Homo sapiens
aaaatatttcagaac

SEQ ID NO: 40639 - DNA, 15 bp, Homo sapiens
aaatatttcagaacg

SEQ ID NO: 40640 - DNA, 15 bp, Homo sapiens
aatatttcagaacgc

SEQ ID NO: 40641 - DNA, 15 bp, Homo sapiens
atatttcagaacgcg

SEQ ID NO: 40642 - DNA, 15 bp, Homo sapiens
tatttcagaacgcgc

SEQ ID NO: 40643 - DNA, 15 bp, Homo sapiens
atttcagaacgcgca

SEQ ID NO: 40644 - DNA, 15 bp, Homo sapiens
tttcagaacgcgcaa

SEQ ID NO: 40645 - DNA, 15 bp, Homo sapiens
ttcagaacgcgcaac

SEQ ID NO: 40646 - DNA, 15 bp, Homo sapiens
tcagaacgcgcaact

SEQ ID NO: 40647 - DNA, 15 bp, Homo sapiens
cagaacgcgcaactg

SEQ ID NO: 40648 - DNA, 15 bp, Homo sapiens
agaacgcgcaactga

SEQ ID NO: 40649 - DNA, 15 bp, Homo sapiens
gaacgcgcaactgat

SEQ ID NO: 40650 - DNA, 15 bp, Homo sapiens
aacgcgcaactgatt

SEQ ID NO: 40651 - DNA, 15 bp, Homo sapiens
acgcgcaactgattt

SEQ ID NO: 40652 - DNA, 15 bp, Homo sapiens
cgcgcaactgatttt

SEQ ID NO: 40653 - DNA, 15 bp, Homo sapiens
gcgcaactgattttt

SEQ ID NO: 40654 - DNA, 15 bp, Homo sapiens
cgcaactgatttttc

SEQ ID NO: 40655 - DNA, 15 bp, Homo sapiens
gcaactgatttttct

SEQ ID NO: 40656 - DNA, 15 bp, Homo sapiens
caactgatttttctt

SEQ ID NO: 40657 - DNA, 15 bp, Homo sapiens
aactgatttttcttc

SEQ ID NO: 40658 - DNA, 15 bp, Homo sapiens
actgatttttcttcc

SEQ ID NO: 40659 - DNA, 15 bp, Homo sapiens
ctgatttttcttcct

SEQ ID NO: 40660 - DNA, 15 bp, Homo sapiens
tgatttttcttcctt

SEQ ID NO: 40661 - DNA, 15 bp, Homo sapiens
gatttttcttcctta

SEQ ID NO: 40662 - DNA, 15 bp, Homo sapiens
atttttcttccttaa

SEQ ID NO: 40663 - DNA, 15 bp, Homo sapiens
tttttcttccttaaa

SEQ ID NO: 40664 - DNA, 15 bp, Homo sapiens
ttttcttccttaaaa

SEQ ID NO: 40665 - DNA, 15 bp, Homo sapiens
tttcttccttaaaac

SEQ ID NO: 40666 - DNA, 15 bp, Homo sapiens
ttcttccttaaaaca

SEQ ID NO: 40667 - DNA, 15 bp, Homo sapiens
tcttccttaaaacaa

SEQ ID NO: 40668 - DNA, 15 bp, Homo sapiens
cttccttaaaacaaa

SEQ ID NO: 40669 - DNA, 15 bp, Homo sapiens
ttccttaaaacaaaa

SEQ ID NO: 40670 - DNA, 15 bp, Homo sapiens
tccttaaaacaaaac

SEQ ID NO: 40671 - DNA, 15 bp, Homo sapiens
ccttaaaacaaaaca

SEQ ID NO: 40672 - DNA, 15 bp, Homo sapiens
cttaaaacaaaacaa

SEQ ID NO: 40673 - DNA, 15 bp, Homo sapiens
ttaaaacaaaacaaa

SEQ ID NO: 40674 - DNA, 15 bp, Homo sapiens
taaaacaaaacaaag

SEQ ID NO: 40675 - DNA, 15 bp, Homo sapiens
aaaacaaaacaaaga

SEQ ID NO: 40676 - DNA, 15 bp, Homo sapiens
aaacaaaacaaagag

SEQ ID NO: 40677 - DNA, 15 bp, Homo sapiens
aacaaaacaaagagg

SEQ ID NO: 40678 - DNA, 15 bp, Homo sapiens
acaaaacaaagagga

SEQ ID NO: 40679 - DNA, 15 bp, Homo sapiens
caaaacaaagaggag

SEQ ID NO: 40680 - DNA, 15 bp, Homo sapiens
aaaacaaagaggaga

SEQ ID NO: 40681 - DNA, 15 bp, Homo sapiens
aaacaaagaggagac

SEQ ID NO: 40682 - DNA, 15 bp, Homo sapiens
aacaaagaggagacc

SEQ ID NO: 40683 - DNA, 15 bp, Homo sapiens
acaaagaggagacca

SEQ ID NO: 40684 - DNA, 15 bp, Homo sapiens
caaagaggagaccag

SEQ ID NO: 40685 - DNA, 15 bp, Homo sapiens
aaagaggagaccaga

SEQ ID NO: 40686 - DNA, 15 bp, Homo sapiens
aagaggagaccagag

SEQ ID NO: 40687 - DNA, 15 bp, Homo sapiens
agaggagaccagagg

SEQ ID NO: 40688 - DNA, 15 bp, Homo sapiens
gaggagaccagaggg

SEQ ID NO: 40689 - DNA, 15 bp, Homo sapiens
aggagaccagagggg

SEQ ID NO: 40690 - DNA, 15 bp, Homo sapiens
ggagaccagaggggg

SEQ ID NO: 40691 - DNA, 15 bp, Homo sapiens
gagaccagaggggga

SEQ ID NO: 40692 - DNA, 15 bp, Homo sapiens
agaccagagggggag

SEQ ID NO: 40693 - DNA, 15 bp, Homo sapiens
gaccagagggggagg

SEQ ID NO: 40694 - DNA, 15 bp, Homo sapiens
accagagggggaggg

SEQ ID NO: 40695 - DNA, 15 bp, Homo sapiens
ccagagggggagggg

SEQ ID NO: 40696 - DNA, 15 bp, Homo sapiens
cagagggggaggggg

SEQ ID NO: 40697 - DNA, 15 bp, Homo sapiens
agagggggagggggg

SEQ ID NO: 40698 - DNA, 15 bp, Homo sapiens
gagggggaggggggg

SEQ ID NO: 40699 - DNA, 15 bp, Homo sapiens
agggggaggggggga

SEQ ID NO: 40700 - DNA, 15 bp, Homo sapiens
gggggagggggggaa

SEQ ID NO: 40701 - DNA, 15 bp, Homo sapiens
ggggagggggggaaa

SEQ ID NO: 40702 - DNA, 15 bp, Homo sapiens
gggagggggggaaag

SEQ ID NO: 40703 - DNA, 15 bp, Homo sapiens
ggagggggggaaaga

SEQ ID NO: 40704 - DNA, 15 bp, Homo sapiens
gagggggggaaagaa

SEQ ID NO: 40705 - DNA, 15 bp, Homo sapiens
agggggggaaagaat

SEQ ID NO: 40706 - DNA, 15 bp, Homo sapiens
gggggggaaagaatg

SEQ ID NO: 40707 - DNA, 15 bp, Homo sapiens
ggggggaaagaatgt

SEQ ID NO: 40708 - DNA, 15 bp, Homo sapiens
gggggaaagaatgtg

SEQ ID NO: 40709 - DNA, 15 bp, Homo sapiens
ggggaaagaatgtgt

SEQ ID NO: 40710 - DNA, 15 bp, Homo sapiens
gggaaagaatgtgtt

SEQ ID NO: 40711 - DNA, 15 bp, Homo sapiens
ggaaagaatgtgttc

SEQ ID NO: 40712 - DNA, 15 bp, Homo sapiens
gaaagaatgtgttct

SEQ ID NO: 40713 - DNA, 15 bp, Homo sapiens
aaagaatgtgttctg

SEQ ID NO: 40714 - DNA, 15 bp, Homo sapiens
aagaatgtgttctga

SEQ ID NO: 40715 - DNA, 15 bp, Homo sapiens
agaatgtgttctgag

SEQ ID NO: 40716 - DNA, 15 bp, Homo sapiens
gaatgtgttctgagc

SEQ ID NO: 40717 - DNA, 15 bp, Homo sapiens
aatgtgttctgagca

SEQ ID NO: 40718 - DNA, 15 bp, Homo sapiens
atgtgttctgagcaa

SEQ ID NO: 40719 - DNA, 15 bp, Homo sapiens
tgtgttctgagcaaa

SEQ ID NO: 40720 - DNA, 15 bp, Homo sapiens
gtgttctgagcaaac

SEQ ID NO: 40721 - DNA, 15 bp, Homo sapiens
tgttctgagcaaaca

SEQ ID NO: 40722 - DNA, 15 bp, Homo sapiens
gttctgagcaaacat

SEQ ID NO: 40723 - DNA, 15 bp, Homo sapiens
ttctgagcaaacata

SEQ ID NO: 40724 - DNA, 15 bp, Homo sapiens
tctgagcaaacatag

SEQ ID NO: 40725 - DNA, 15 bp, Homo sapiens
ctgagcaaacatagg

SEQ ID NO: 40726 - DNA, 15 bp, Homo sapiens
tgagcaaacataggt

SEQ ID NO: 40727 - DNA, 15 bp, Homo sapiens
gagcaaacataggtc

SEQ ID NO: 40728 - DNA, 15 bp, Homo sapiens
agcaaacataggtcc

SEQ ID NO: 40729 - DNA, 15 bp, Homo sapiens
gcaaacataggtcct

SEQ ID NO: 40730 - DNA, 15 bp, Homo sapiens
caaacataggtcctt

SEQ ID NO: 40731 - DNA, 15 bp, Homo sapiens
aaacataggtccttc

SEQ ID NO: 40732 - DNA, 15 bp, Homo sapiens
aacataggtccttcc

SEQ ID NO: 40733 - DNA, 15 bp, Homo sapiens
acataggtccttccg

SEQ ID NO: 40734 - DNA, 15 bp, Homo sapiens
cataggtccttccgt

SEQ ID NO: 40735 - DNA, 15 bp, Homo sapiens
ataggtccttccgtc

SEQ ID NO: 40736 - DNA, 15 bp, Homo sapiens
taggtccttccgtca

SEQ ID NO: 40737 - DNA, 15 bp, Homo sapiens
aggtccttccgtcaa

SEQ ID NO: 40738 - DNA, 15 bp, Homo sapiens
ggtccttccgtcaaa

SEQ ID NO: 40739 - DNA, 15 bp, Homo sapiens
gtccttccgtcaaaa

SEQ ID NO: 40740 - DNA, 15 bp, Homo sapiens
tccttccgtcaaaag

SEQ ID NO: 40741 - DNA, 15 bp, Homo sapiens
ccttccgtcaaaagc

SEQ ID NO: 40742 - DNA, 15 bp, Homo sapiens
cttccgtcaaaagca

SEQ ID NO: 40743 - DNA, 15 bp, Homo sapiens
ttccgtcaaaagcag

SEQ ID NO: 40744 - DNA, 15 bp, Homo sapiens
tccgtcaaaagcagc

SEQ ID NO: 40745 - DNA, 15 bp, Homo sapiens
ccgtcaaaagcagct

SEQ ID NO: 40746 - DNA, 15 bp, Homo sapiens
cgtcaaaagcagctt

SEQ ID NO: 40747 - DNA, 15 bp, Homo sapiens
gtcaaaagcagctta

SEQ ID NO: 40748 - DNA, 15 bp, Homo sapiens
tcaaaagcagcttac

SEQ ID NO: 40749 - DNA, 15 bp, Homo sapiens
caaaagcagcttact

SEQ ID NO: 40750 - DNA, 15 bp, Homo sapiens
aaaagcagcttactc

SEQ ID NO: 40751 - DNA, 15 bp, Homo sapiens
aaagcagcttactct

SEQ ID NO: 40752 - DNA, 15 bp, Homo sapiens
aagcagcttactctg

SEQ ID NO: 40753 - DNA, 15 bp, Homo sapiens
agcagcttactctga

SEQ ID NO: 40754 - DNA, 15 bp, Homo sapiens
gcagcttactctgac

SEQ ID NO: 40755 - DNA, 15 bp, Homo sapiens
cagcttactctgacc

SEQ ID NO: 40756 - DNA, 15 bp, Homo sapiens
agcttactctgacca

SEQ ID NO: 40757 - DNA, 15 bp, Homo sapiens
gcttactctgaccaa

SEQ ID NO: 40758 - DNA, 15 bp, Homo sapiens
cttactctgaccaac

SEQ ID NO: 40759 - DNA, 15 bp, Homo sapiens
ttactctgaccaacg

SEQ ID NO: 40760 - DNA, 15 bp, Homo sapiens
tactctgaccaacgc

SEQ ID NO: 40761 - DNA, 15 bp, Homo sapiens
actctgaccaacgcc

SEQ ID NO: 40762 - DNA, 15 bp, Homo sapiens
ctctgaccaacgccc

SEQ ID NO: 40763 - DNA, 15 bp, Homo sapiens
tctgaccaacgccca

SEQ ID NO: 40764 - DNA, 15 bp, Homo sapiens
ctgaccaacgcccaa

SEQ ID NO: 40765 - DNA, 15 bp, Homo sapiens
tgaccaacgcccaaa

SEQ ID NO: 40766 - DNA, 15 bp, Homo sapiens
gaccaacgcccaaag

SEQ ID NO: 40767 - DNA, 15 bp, Homo sapiens
accaacgcccaaaga

SEQ ID NO: 40768 - DNA, 15 bp, Homo sapiens
ccaacgcccaaagaa

SEQ ID NO: 40769 - DNA, 15 bp, Homo sapiens
caacgcccaaagaat

SEQ ID NO: 40770 - DNA, 15 bp, Homo sapiens
aacgcccaaagaatg

SEQ ID NO: 40771 - DNA, 15 bp, Homo sapiens
acgcccaaagaatga

SEQ ID NO: 40772 - DNA, 15 bp, Homo sapiens
cgcccaaagaatgag

SEQ ID NO: 40773 - DNA, 15 bp, Homo sapiens
gcccaaagaatgagc

SEQ ID NO: 40774 - DNA, 15 bp, Homo sapiens
cccaaagaatgagcg

SEQ ID NO: 40775 - DNA, 15 bp, Homo sapiens
ccaaagaatgagcgg

SEQ ID NO: 40776 - DNA, 15 bp, Homo sapiens
caaagaatgagcggg

SEQ ID NO: 40777 - DNA, 15 bp, Homo sapiens
aaagaatgagcgggg

SEQ ID NO: 40778 - DNA, 15 bp, Homo sapiens
aagaatgagcggggc

SEQ ID NO: 40779 - DNA, 15 bp, Homo sapiens
agaatgagcggggcc

SEQ ID NO: 40780 - DNA, 15 bp, Homo sapiens
gaatgagcggggcct

SEQ ID NO: 40781 - DNA, 15 bp, Homo sapiens
aatgagcggggcctg

SEQ ID NO: 40782 - DNA, 15 bp, Homo sapiens
atgagcggggcctgg

SEQ ID NO: 40783 - DNA, 15 bp, Homo sapiens
tgagcggggcctggg

SEQ ID NO: 40784 - DNA, 15 bp, Homo sapiens
gagcggggcctggga

SEQ ID NO: 40785 - DNA, 15 bp, Homo sapiens
agcggggcctgggag

SEQ ID NO: 40786 - DNA, 15 bp, Homo sapiens
gcggggcctgggagg

SEQ ID NO: 40787 - DNA, 15 bp, Homo sapiens
cggggcctgggaggt

SEQ ID NO: 40788 - DNA, 15 bp, Homo sapiens
ggggcctgggaggtg

SEQ ID NO: 40789 - DNA, 15 bp, Homo sapiens
gggcctgggaggtgc

SEQ ID NO: 40790 - DNA, 15 bp, Homo sapiens
ggcctgggaggtgca

SEQ ID NO: 40791 - DNA, 15 bp, Homo sapiens
gcctgggaggtgcat

SEQ ID NO: 40792 - DNA, 15 bp, Homo sapiens
cctgggaggtgcatc

SEQ ID NO: 40793 - DNA, 15 bp, Homo sapiens
ctgggaggtgcatca

SEQ ID NO: 40794 - DNA, 15 bp, Homo sapiens
tgggaggtgcatcac

SEQ ID NO: 40795 - DNA, 15 bp, Homo sapiens
gggaggtgcatcacg

SEQ ID NO: 40796 - DNA, 15 bp, Homo sapiens
ggaggtgcatcacgg

SEQ ID NO: 40797 - DNA, 15 bp, Homo sapiens
gaggtgcatcacggg

SEQ ID NO: 40798 - DNA, 15 bp, Homo sapiens
aggtgcatcacggga

SEQ ID NO: 40799 - DNA, 15 bp, Homo sapiens
ggtgcatcacgggat

SEQ ID NO: 40800 - DNA, 15 bp, Homo sapiens
gtgcatcacgggatg

SEQ ID NO: 40801 - DNA, 15 bp, Homo sapiens
tgcatcacgggatgt

SEQ ID NO: 40802 - DNA, 15 bp, Homo sapiens
gcatcacgggatgtg

SEQ ID NO: 40803 - DNA, 15 bp, Homo sapiens
catcacgggatgtgg

SEQ ID NO: 40804 - DNA, 15 bp, Homo sapiens
atcacgggatgtgga

SEQ ID NO: 40805 - DNA, 15 bp, Homo sapiens
tcacgggatgtggag

SEQ ID NO: 40806 - DNA, 15 bp, Homo sapiens
cacgggatgtggagt

SEQ ID NO: 40807 - DNA, 15 bp, Homo sapiens
acgggatgtggagtg

SEQ ID NO: 40808 - DNA, 15 bp, Homo sapiens
cgggatgtggagtgt

SEQ ID NO: 40809 - DNA, 15 bp, Homo sapiens
gggatgtggagtgtg

SEQ ID NO: 40810 - DNA, 15 bp, Homo sapiens
ggatgtggagtgtga

SEQ ID NO: 40811 - DNA, 15 bp, Homo sapiens
gatgtggagtgtgag

SEQ ID NO: 40812 - DNA, 15 bp, Homo sapiens
atgtggagtgtgagc

SEQ ID NO: 40813 - DNA, 15 bp, Homo sapiens
tgtggagtgtgagca

SEQ ID NO: 40814 - DNA, 15 bp, Homo sapiens
gtggagtgtgagcat

SEQ ID NO: 40815 - DNA, 15 bp, Homo sapiens
tggagtgtgagcatt

SEQ ID NO: 40816 - DNA, 15 bp, Homo sapiens
ggagtgtgagcattt

SEQ ID NO: 40817 - DNA, 15 bp, Homo sapiens
gagtgtgagcatttt

SEQ ID NO: 40818 - DNA, 15 bp, Homo sapiens
agtgtgagcattttt

SEQ ID NO: 40819 - DNA, 15 bp, Homo sapiens
gtgtgagcatttttt

SEQ ID NO: 40820 - DNA, 15 bp, Homo sapiens
tgtgagcattttttt

SEQ ID NO: 40821 - DNA, 15 bp, Homo sapiens
gtgagcatttttttg

SEQ ID NO: 40822 - DNA, 15 bp, Homo sapiens
tgagcatttttttgt

SEQ ID NO: 40823 - DNA, 15 bp, Homo sapiens
gagcatttttttgtt

SEQ ID NO: 40824 - DNA, 15 bp, Homo sapiens
agcatttttttgttc

SEQ ID NO: 40825 - DNA, 15 bp, Homo sapiens
gcatttttttgttca

SEQ ID NO: 40826 - DNA, 15 bp, Homo sapiens
catttttttgttcag

SEQ ID NO: 40827 - DNA, 15 bp, Homo sapiens
atttttttgttcagt

SEQ ID NO: 40828 - DNA, 15 bp, Homo sapiens
tttttttgttcagtt

SEQ ID NO: 40829 - DNA, 15 bp, Homo sapiens
ttttttgttcagttg

SEQ ID NO: 40830 - DNA, 15 bp, Homo sapiens
tttttgttcagttgc

SEQ ID NO: 40831 - DNA, 15 bp, Homo sapiens
ttttgttcagttgcc

SEQ ID NO: 40832 - DNA, 15 bp, Homo sapiens
tttgttcagttgcct

SEQ ID NO: 40833 - DNA, 15 bp, Homo sapiens
ttgttcagttgcctt

SEQ ID NO: 40834 - DNA, 15 bp, Homo sapiens
tgttcagttgcctta

SEQ ID NO: 40835 - DNA, 15 bp, Homo sapiens
gttcagttgccttaa

SEQ ID NO: 40836 - DNA, 15 bp, Homo sapiens
ttcagttgccttaat

SEQ ID NO: 40837 - DNA, 15 bp, Homo sapiens
tcagttgccttaatt

SEQ ID NO: 40838 - DNA, 15 bp, Homo sapiens
cagttgccttaattt

SEQ ID NO: 40839 - DNA, 15 bp, Homo sapiens
agttgccttaatttt

SEQ ID NO: 40840 - DNA, 15 bp, Homo sapiens
gttgccttaattttt

SEQ ID NO: 40841 - DNA, 15 bp, Homo sapiens
ttgccttaattttta

SEQ ID NO: 40842 - DNA, 15 bp, Homo sapiens
tgccttaatttttat

SEQ ID NO: 40843 - DNA, 15 bp, Homo sapiens
gccttaatttttatt

SEQ ID NO: 40844 - DNA, 15 bp, Homo sapiens
ccttaatttttattc

SEQ ID NO: 40845 - DNA, 15 bp, Homo sapiens
cttaatttttattca

SEQ ID NO: 40846 - DNA, 15 bp, Homo sapiens
ttaatttttattcac

SEQ ID NO: 40847 - DNA, 15 bp, Homo sapiens
taatttttattcact

SEQ ID NO: 40848 - DNA, 15 bp, Homo sapiens
aatttttattcactt

SEQ ID NO: 40849 - DNA, 15 bp, Homo sapiens
atttttattcacttt

SEQ ID NO: 40850 - DNA, 15 bp, Homo sapiens
tttttattcactttc

SEQ ID NO: 40851 - DNA, 15 bp, Homo sapiens
ttttattcactttct

SEQ ID NO: 40852 - DNA, 15 bp, Homo sapiens
tttattcactttcta

SEQ ID NO: 40853 - DNA, 15 bp, Homo sapiens
ttattcactttctag

SEQ ID NO: 40854 - DNA, 15 bp, Homo sapiens
tattcactttctagt

SEQ ID NO: 40855 - DNA, 15 bp, Homo sapiens
attcactttctagtc

SEQ ID NO: 40856 - DNA, 15 bp, Homo sapiens
ttcactttctagtca

SEQ ID NO: 40857 - DNA, 15 bp, Homo sapiens
tcactttctagtcat

SEQ ID NO: 40858 - DNA, 15 bp, Homo sapiens
cactttctagtcatc

SEQ ID NO: 40859 - DNA, 15 bp, Homo sapiens
actttctagtcatct

SEQ ID NO: 40860 - DNA, 15 bp, Homo sapiens
ctttctagtcatctg

SEQ ID NO: 40861 - DNA, 15 bp, Homo sapiens
tttctagtcatctga

SEQ ID NO: 40862 - DNA, 15 bp, Homo sapiens
ttctagtcatctgat

SEQ ID NO: 40863 - DNA, 15 bp, Homo sapiens
tctagtcatctgatc

SEQ ID NO: 40864 - DNA, 15 bp, Homo sapiens
ctagtcatctgatcg

SEQ ID NO: 40865 - DNA, 15 bp, Homo sapiens
tagtcatctgatcga

SEQ ID NO: 40866 - DNA, 15 bp, Homo sapiens
agtcatctgatcgat

SEQ ID NO: 40867 - DNA, 15 bp, Homo sapiens
gtcatctgatcgata

SEQ ID NO: 40868 - DNA, 15 bp, Homo sapiens
tcatctgatcgatat

SEQ ID NO: 40869 - DNA, 15 bp, Homo sapiens
catctgatcgatatt

SEQ ID NO: 40870 - DNA, 15 bp, Homo sapiens
atctgatcgatattg

SEQ ID NO: 40871 - DNA, 15 bp, Homo sapiens
tctgatcgatattgc

SEQ ID NO: 40872 - DNA, 15 bp, Homo sapiens
ctgatcgatattgca

SEQ ID NO: 40873 - DNA, 15 bp, Homo sapiens
tgatcgatattgcaa

SEQ ID NO: 40874 - DNA, 15 bp, Homo sapiens
gatcgatattgcaaa

SEQ ID NO: 40875 - DNA, 15 bp, Homo sapiens
atcgatattgcaaac

SEQ ID NO: 40876 - DNA, 15 bp, Homo sapiens
tcgatattgcaaaca

SEQ ID NO: 40877 - DNA, 15 bp, Homo sapiens
cgatattgcaaacat

SEQ ID NO: 40878 - DNA, 15 bp, Homo sapiens
gatattgcaaacatc

SEQ ID NO: 40879 - DNA, 15 bp, Homo sapiens
atattgcaaacatct

SEQ ID NO: 40880 - DNA, 15 bp, Homo sapiens
tattgcaaacatctt

SEQ ID NO: 40881 - DNA, 15 bp, Homo sapiens
attgcaaacatcttc

SEQ ID NO: 40882 - DNA, 15 bp, Homo sapiens
ttgcaaacatcttca

SEQ ID NO: 40883 - DNA, 15 bp, Homo sapiens
tgcaaacatcttcac

SEQ ID NO: 40884 - DNA, 15 bp, Homo sapiens
gcaaacatcttcaca

SEQ ID NO: 40885 - DNA, 15 bp, Homo sapiens
caaacatcttcacaa

SEQ ID NO: 40886 - DNA, 15 bp, Homo sapiens
aaacatcttcacaac

SEQ ID NO: 40887 - DNA, 15 bp, Homo sapiens
aacatcttcacaaca

SEQ ID NO: 40888 - DNA, 15 bp, Homo sapiens
acatcttcacaacat

SEQ ID NO: 40889 - DNA, 15 bp, Homo sapiens
catcttcacaacata

SEQ ID NO: 40890 - DNA, 15 bp, Homo sapiens
atcttcacaacatac

SEQ ID NO: 40891 - DNA, 15 bp, Homo sapiens
tcttcacaacataca

SEQ ID NO: 40892 - DNA, 15 bp, Homo sapiens
cttcacaacatacaa

SEQ ID NO: 40893 - DNA, 15 bp, Homo sapiens
ttcacaacatacaaa

SEQ ID NO: 40894 - DNA, 15 bp, Homo sapiens
tcacaacatacaaat

SEQ ID NO: 40895 - DNA, 15 bp, Homo sapiens
cacaacatacaaatg

SEQ ID NO: 40896 - DNA, 15 bp, Homo sapiens
acaacatacaaatgt

SEQ ID NO: 40897 - DNA, 15 bp, Homo sapiens
caacatacaaatgta

SEQ ID NO: 40898 - DNA, 15 bp, Homo sapiens
aacatacaaatgtat

SEQ ID NO: 40899 - DNA, 15 bp, Homo sapiens
acatacaaatgtatc

SEQ ID NO: 40900 - DNA, 15 bp, Homo sapiens
catacaaatgtatct

SEQ ID NO: 40901 - DNA, 15 bp, Homo sapiens
atacaaatgtatctt

SEQ ID NO: 40902 - DNA, 15 bp, Homo sapiens
tacaaatgtatcttt

SEQ ID NO: 40903 - DNA, 15 bp, Homo sapiens
acaaatgtatctttt

SEQ ID NO: 40904 - DNA, 15 bp, Homo sapiens
caaatgtatctttta

SEQ ID NO: 40905 - DNA, 15 bp, Homo sapiens
aaatgtatcttttat

SEQ ID NO: 40906 - DNA, 15 bp, Homo sapiens
aatgtatcttttatc

SEQ ID NO: 40907 - DNA, 15 bp, Homo sapiens
atgtatcttttatca

SEQ ID NO: 40908 - DNA, 15 bp, Homo sapiens
tgtatcttttatcag

SEQ ID NO: 40909 - DNA, 15 bp, Homo sapiens
gtatcttttatcagc

SEQ ID NO: 40910 - DNA, 15 bp, Homo sapiens
tatcttttatcagcc

SEQ ID NO: 40911 - DNA, 15 bp, Homo sapiens
atcttttatcagcca

SEQ ID NO: 40912 - DNA, 15 bp, Homo sapiens
tcttttatcagccag

SEQ ID NO: 40913 - DNA, 15 bp, Homo sapiens
cttttatcagccaga

SEQ ID NO: 40914 - DNA, 15 bp, Homo sapiens
ttttatcagccagaa

SEQ ID NO: 40915 - DNA, 15 bp, Homo sapiens
tttatcagccagaat

SEQ ID NO: 40916 - DNA, 15 bp, Homo sapiens
ttatcagccagaata

SEQ ID NO: 40917 - DNA, 15 bp, Homo sapiens
tatcagccagaatat

SEQ ID NO: 40918 - DNA, 15 bp, Homo sapiens
atcagccagaatata

SEQ ID NO: 40919 - DNA, 15 bp, Homo sapiens
tcagccagaatatat

SEQ ID NO: 40920 - DNA, 15 bp, Homo sapiens
cagccagaatatata

SEQ ID NO: 40921 - DNA, 15 bp, Homo sapiens
agccagaatatatat

SEQ ID NO: 40922 - DNA, 15 bp, Homo sapiens
gccagaatatatatt

SEQ ID NO: 40923 - DNA, 15 bp, Homo sapiens
ccagaatatatattg

SEQ ID NO: 40924 - DNA, 15 bp, Homo sapiens
cagaatatatattgt

SEQ ID NO: 40925 - DNA, 15 bp, Homo sapiens
agaatatatattgta

SEQ ID NO: 40926 - DNA, 15 bp, Homo sapiens
gaatatatattgtag

SEQ ID NO: 40927 - DNA, 15 bp, Homo sapiens
aatatatattgtagg

SEQ ID NO: 40928 - DNA, 15 bp, Homo sapiens
atatatattgtagga

SEQ ID NO: 40929 - DNA, 15 bp, Homo sapiens
tatatattgtaggaa

SEQ ID NO: 40930 - DNA, 15 bp, Homo sapiens
atatattgtaggaat

SEQ ID NO: 40931 - DNA, 15 bp, Homo sapiens
tatattgtaggaatt

SEQ ID NO: 40932 - DNA, 15 bp, Homo sapiens
atattgtaggaattc

SEQ ID NO: 40933 - DNA, 15 bp, Homo sapiens
tattgtaggaattct

SEQ ID NO: 40934 - DNA, 15 bp, Homo sapiens
attgtaggaattctt

SEQ ID NO: 40935 - DNA, 15 bp, Homo sapiens
ttgtaggaattcttt

SEQ ID NO: 40936 - DNA, 15 bp, Homo sapiens
tgtaggaattctttc

SEQ ID NO: 40937 - DNA, 15 bp, Homo sapiens
gtaggaattctttcc

SEQ ID NO: 40938 - DNA, 15 bp, Homo sapiens
taggaattctttccc

SEQ ID NO: 40939 - DNA, 15 bp, Homo sapiens
aggaattctttcccc

SEQ ID NO: 40940 - DNA, 15 bp, Homo sapiens
ggaattctttcccca

SEQ ID NO: 40941 - DNA, 15 bp, Homo sapiens
gaattctttccccat

SEQ ID NO: 40942 - DNA, 15 bp, Homo sapiens
aattctttccccatc

SEQ ID NO: 40943 - DNA, 15 bp, Homo sapiens
attctttccccatct

SEQ ID NO: 40944 - DNA, 15 bp, Homo sapiens
ttctttccccatctc

SEQ ID NO: 40945 - DNA, 15 bp, Homo sapiens
tctttccccatctct

SEQ ID NO: 40946 - DNA, 15 bp, Homo sapiens
ctttccccatctcta

SEQ ID NO: 40947 - DNA, 15 bp, Homo sapiens
tttccccatctctac

SEQ ID NO: 40948 - DNA, 15 bp, Homo sapiens
ttccccatctctact

SEQ ID NO: 40949 - DNA, 15 bp, Homo sapiens
tccccatctctactc

SEQ ID NO: 40950 - DNA, 15 bp, Homo sapiens
ccccatctctactcc

SEQ ID NO: 40951 - DNA, 15 bp, Homo sapiens
cccatctctactccc

SEQ ID NO: 40952 - DNA, 15 bp, Homo sapiens
ccatctctactccct

SEQ ID NO: 40953 - DNA, 15 bp, Homo sapiens
catctctactccctg

SEQ ID NO: 40954 - DNA, 15 bp, Homo sapiens
atctctactccctgt

SEQ ID NO: 40955 - DNA, 15 bp, Homo sapiens
tctctactccctgtg

SEQ ID NO: 40956 - DNA, 15 bp, Homo sapiens
ctctactccctgtgg

SEQ ID NO: 40957 - DNA, 15 bp, Homo sapiens
tctactccctgtggg

SEQ ID NO: 40958 - DNA, 15 bp, Homo sapiens
ctactccctgtggga

SEQ ID NO: 40959 - DNA, 15 bp, Homo sapiens
tactccctgtgggaa

SEQ ID NO: 40960 - DNA, 15 bp, Homo sapiens
actccctgtgggaac

SEQ ID NO: 40961 - DNA, 15 bp, Homo sapiens
ctccctgtgggaact

SEQ ID NO: 40962 - DNA, 15 bp, Homo sapiens
tccctgtgggaacta

SEQ ID NO: 40963 - DNA, 15 bp, Homo sapiens
ccctgtgggaactaa

SEQ ID NO: 40964 - DNA, 15 bp, Homo sapiens
cctgtgggaactaaa

SEQ ID NO: 40965 - DNA, 15 bp, Homo sapiens
ctgtgggaactaaaa

SEQ ID NO: 40966 - DNA, 15 bp, Homo sapiens
tgtgggaactaaaaa

SEQ ID NO: 40967 - DNA, 15 bp, Homo sapiens
gtgggaactaaaaaa

SEQ ID NO: 40968 - DNA, 15 bp, Homo sapiens
tgggaactaaaaaac

SEQ ID NO: 40969 - DNA, 15 bp, Homo sapiens
gggaactaaaaaaca

SEQ ID NO: 40970 - DNA, 15 bp, Homo sapiens
ggaactaaaaaacaa

SEQ ID NO: 40971 - DNA, 15 bp, Homo sapiens
gaactaaaaaacaaa

SEQ ID NO: 40972 - DNA, 15 bp, Homo sapiens
aactaaaaaacaaaa

SEQ ID NO: 40973 - DNA, 15 bp, Homo sapiens
actaaaaaacaaaac

SEQ ID NO: 40974 - DNA, 15 bp, Homo sapiens
ctaaaaaacaaaaca

SEQ ID NO: 40975 - DNA, 15 bp, Homo sapiens
aaaaacaaaacaaac

SEQ ID NO: 40976 - DNA, 15 bp, Homo sapiens
aaaacaaaacaaaca

SEQ ID NO: 40977 - DNA, 15 bp, Homo sapiens
aaacaaaacaaacaa

SEQ ID NO: 40978 - DNA, 15 bp, Homo sapiens
aacaaaacaaacaaa

SEQ ID NO: 40979 - DNA, 15 bp, Homo sapiens
acaaaacaaacaaac

SEQ ID NO: 40980 - DNA, 15 bp, Homo sapiens
caaaacaaacaaacg

SEQ ID NO: 40981 - DNA, 15 bp, Homo sapiens
aaaacaaacaaacga

SEQ ID NO: 40982 - DNA, 15 bp, Homo sapiens
aaacaaacaaacgaa

SEQ ID NO: 40983 - DNA, 15 bp, Homo sapiens
aacaaacaaacgaaa

SEQ ID NO: 40984 - DNA, 15 bp, Homo sapiens
acaaacaaacgaaaa

SEQ ID NO: 40985 - DNA, 15 bp, Homo sapiens
caaacaaacgaaaaa

SEQ ID NO: 40986 - DNA, 15 bp, Homo sapiens
aaacaaacgaaaaaa

SEQ ID NO: 40987 - DNA, 15 bp, Homo sapiens
aacaaacgaaaaaaa

SEQ ID NO: 40988 - DNA, 15 bp, Homo sapiens
acaaacgaaaaaaaa

SEQ ID NO: 40989 - DNA, 15 bp, Homo sapiens
caaacgaaaaaaaaa

SEQ ID NO: 40990 - DNA, 15 bp, Homo sapiens
aaacgaaaaaaaaac

SEQ ID NO: 40991 - DNA, 15 bp, Homo sapiens
aacgaaaaaaaaaca

SEQ ID NO: 40992 - DNA, 15 bp, Homo sapiens
acgaaaaaaaaacac

SEQ ID NO: 40993 - DNA, 15 bp, Homo sapiens
cgaaaaaaaaacaca

SEQ ID NO: 40994 - DNA, 15 bp, Homo sapiens
gaaaaaaaaacacaa

SEQ ID NO: 40995 - DNA, 15 bp, Homo sapiens
aaaaaaaaacacaaa

SEQ ID NO: 40996 - DNA, 15 bp, Homo sapiens
aaaaaaaacacaaaa

SEQ ID NO: 40997 - DNA, 15 bp, Homo sapiens
aaaaaaacacaaaac

SEQ ID NO: 40998 - DNA, 15 bp, Homo sapiens
aaaaaacacaaaaca

SEQ ID NO: 40999 - DNA, 15 bp, Homo sapiens
aaaaacacaaaacaa

SEQ ID NO: 41000 - DNA, 15 bp, Homo sapiens
aaaacacaaaacaaa

SEQ ID NO: 41001 - DNA, 15 bp, Homo sapiens
aaacacaaaacaaac

SEQ ID NO: 41002 - DNA, 15 bp, Homo sapiens
aacacaaaacaaaca

SEQ ID NO: 41003 - DNA, 15 bp, Homo sapiens
acacaaaacaaacaa

SEQ ID NO: 41004 - DNA, 15 bp, Homo sapiens
cacaaaacaaacaaa

SEQ ID NO: 41005 - DNA, 15 bp, Homo sapiens
acaaaacaaacaaaa

SEQ ID NO: 41006 - DNA, 15 bp, Homo sapiens
caaaacaaacaaaaa

SEQ ID NO: 41007 - DNA, 15 bp, Homo sapiens
aaaacaaacaaaaat

SEQ ID NO: 41008 - DNA, 15 bp, Homo sapiens
aaacaaacaaaaata

SEQ ID NO: 41009 - DNA, 15 bp, Homo sapiens
aacaaacaaaaatat

SEQ ID NO: 41010 - DNA, 15 bp, Homo sapiens
acaaacaaaaatata

SEQ ID NO: 41011 - DNA, 15 bp, Homo sapiens
caaacaaaaatatac

SEQ ID NO: 41012 - DNA, 15 bp, Homo sapiens
aaacaaaaatatacc

SEQ ID NO: 41013 - DNA, 15 bp, Homo sapiens
aacaaaaatataccc

SEQ ID NO: 41014 - DNA, 15 bp, Homo sapiens
acaaaaatatacccc

SEQ ID NO: 41015 - DNA, 15 bp, Homo sapiens
caaaaatataccccc

SEQ ID NO: 41016 - DNA, 15 bp, Homo sapiens
aaaaatatacccccc

SEQ ID NO: 41017 - DNA, 15 bp, Homo sapiens
aaaatatacccccca

SEQ ID NO: 41018 - DNA, 15 bp, Homo sapiens
aaatataccccccat

SEQ ID NO: 41019 - DNA, 15 bp, Homo sapiens
aatataccccccatc

SEQ ID NO: 41020 - DNA, 15 bp, Homo sapiens
atataccccccatcc

SEQ ID NO: 41021 - DNA, 15 bp, Homo sapiens
tataccccccatccc

SEQ ID NO: 41022 - DNA, 15 bp, Homo sapiens
ataccccccatcccc

SEQ ID NO: 41023 - DNA, 15 bp, Homo sapiens
taccccccatccccc

SEQ ID NO: 41024 - DNA, 15 bp, Homo sapiens
accccccatccccca

SEQ ID NO: 41025 - DNA, 15 bp, Homo sapiens
ccccccatcccccat

SEQ ID NO: 41026 - DNA, 15 bp, Homo sapiens
cccccatcccccatc

SEQ ID NO: 41027 - DNA, 15 bp, Homo sapiens
ccccatcccccatcc

SEQ ID NO: 41028 - DNA, 15 bp, Homo sapiens
cccatcccccatccc

SEQ ID NO: 41029 - DNA, 15 bp, Homo sapiens
ccatcccccatcccc

SEQ ID NO: 41030 - DNA, 15 bp, Homo sapiens
catcccccatcccct

SEQ ID NO: 41031 - DNA, 15 bp, Homo sapiens
atcccccatccccta

SEQ ID NO: 41032 - DNA, 15 bp, Homo sapiens
tcccccatcccctaa

SEQ ID NO: 41033 - DNA, 15 bp, Homo sapiens
cccccatcccctaag

SEQ ID NO: 41034 - DNA, 15 bp, Homo sapiens
ccccatcccctaagc

SEQ ID NO: 41035 - DNA, 15 bp, Homo sapiens
cccatcccctaagcc

SEQ ID NO: 41036 - DNA, 15 bp, Homo sapiens
ccatcccctaagcca

SEQ ID NO: 41037 - DNA, 15 bp, Homo sapiens
catcccctaagccag

SEQ ID NO: 41038 - DNA, 15 bp, Homo sapiens
atcccctaagccagt

SEQ ID NO: 41039 - DNA, 15 bp, Homo sapiens
tcccctaagccagta

SEQ ID NO: 41040 - DNA, 15 bp, Homo sapiens
cccctaagccagtaa

SEQ ID NO: 41041 - DNA, 15 bp, Homo sapiens
ccctaagccagtaaa

SEQ ID NO: 41042 - DNA, 15 bp, Homo sapiens
cctaagccagtaaag

SEQ ID NO: 41043 - DNA, 15 bp, Homo sapiens
ctaagccagtaaagc

SEQ ID NO: 41044 - DNA, 15 bp, Homo sapiens
taagccagtaaagca

SEQ ID NO: 41045 - DNA, 15 bp, Homo sapiens
aagccagtaaagcaa

SEQ ID NO: 41046 - DNA, 15 bp, Homo sapiens
agccagtaaagcaat

SEQ ID NO: 41047 - DNA, 15 bp, Homo sapiens
gccagtaaagcaatg

SEQ ID NO: 41048 - DNA, 15 bp, Homo sapiens
ccagtaaagcaatga

SEQ ID NO: 41049 - DNA, 15 bp, Homo sapiens
cagtaaagcaatgac

SEQ ID NO: 41050 - DNA, 15 bp, Homo sapiens
agtaaagcaatgaca

SEQ ID NO: 41051 - DNA, 15 bp, Homo sapiens
gtaaagcaatgacaa

SEQ ID NO: 41052 - DNA, 15 bp, Homo sapiens
taaagcaatgacaac

SEQ ID NO: 41053 - DNA, 15 bp, Homo sapiens
aaagcaatgacaaca

SEQ ID NO: 41054 - DNA, 15 bp, Homo sapiens
aagcaatgacaacag

SEQ ID NO: 41055 - DNA, 15 bp, Homo sapiens
agcaatgacaacagc

SEQ ID NO: 41056 - DNA, 15 bp, Homo sapiens
gcaatgacaacagca

SEQ ID NO: 41057 - DNA, 15 bp, Homo sapiens
caatgacaacagcac

SEQ ID NO: 41058 - DNA, 15 bp, Homo sapiens
aatgacaacagcacc

SEQ ID NO: 41059 - DNA, 15 bp, Homo sapiens
atgacaacagcacct

SEQ ID NO: 41060 - DNA, 15 bp, Homo sapiens
tgacaacagcacctt

SEQ ID NO: 41061 - DNA, 15 bp, Homo sapiens
gacaacagcaccttg

SEQ ID NO: 41062 - DNA, 15 bp, Homo sapiens
acaacagcaccttga

SEQ ID NO: 41063 - DNA, 15 bp, Homo sapiens
caacagcaccttgac

SEQ ID NO: 41064 - DNA, 15 bp, Homo sapiens
aacagcaccttgaca

SEQ ID NO: 41065 - DNA, 15 bp, Homo sapiens
acagcaccttgacat

SEQ ID NO: 41066 - DNA, 15 bp, Homo sapiens
cagcaccttgacatt

SEQ ID NO: 41067 - DNA, 15 bp, Homo sapiens
agcaccttgacattg

SEQ ID NO: 41068 - DNA, 15 bp, Homo sapiens
gcaccttgacattgt

SEQ ID NO: 41069 - DNA, 15 bp, Homo sapiens
caccttgacattgtt

SEQ ID NO: 41070 - DNA, 15 bp, Homo sapiens
accttgacattgttt

SEQ ID NO: 41071 - DNA, 15 bp, Homo sapiens
ccttgacattgtttt

SEQ ID NO: 41072 - DNA, 15 bp, Homo sapiens
cttgacattgtttta

SEQ ID NO: 41073 - DNA, 15 bp, Homo sapiens
ttgacattgttttaa

SEQ ID NO: 41074 - DNA, 15 bp, Homo sapiens
tgacattgttttaat

SEQ ID NO: 41075 - DNA, 15 bp, Homo sapiens
gacattgttttaatt

SEQ ID NO: 41076 - DNA, 15 bp, Homo sapiens
acattgttttaattc

SEQ ID NO: 41077 - DNA, 15 bp, Homo sapiens
cattgttttaattcc

SEQ ID NO: 41078 - DNA, 15 bp, Homo sapiens
attgttttaattcca

SEQ ID NO: 41079 - DNA, 15 bp, Homo sapiens
ttgttttaattccaa

SEQ ID NO: 41080 - DNA, 15 bp, Homo sapiens
tgttttaattccaac

SEQ ID NO: 41081 - DNA, 15 bp, Homo sapiens
gttttaattccaacg

SEQ ID NO: 41082 - DNA, 15 bp, Homo sapiens
ttttaattccaacgc

SEQ ID NO: 41083 - DNA, 15 bp, Homo sapiens
tttaattccaacgct

SEQ ID NO: 41084 - DNA, 15 bp, Homo sapiens
ttaattccaacgcta

SEQ ID NO: 41085 - DNA, 15 bp, Homo sapiens
taattccaacgctat

SEQ ID NO: 41086 - DNA, 15 bp, Homo sapiens
aattccaacgctatc

SEQ ID NO: 41087 - DNA, 15 bp, Homo sapiens
attccaacgctatca

SEQ ID NO: 41088 - DNA, 15 bp, Homo sapiens
ttccaacgctatcag

SEQ ID NO: 41089 - DNA, 15 bp, Homo sapiens
tccaacgctatcaga

SEQ ID NO: 41090 - DNA, 15 bp, Homo sapiens
ccaacgctatcagaa

SEQ ID NO: 41091 - DNA, 15 bp, Homo sapiens
caacgctatcagaag

SEQ ID NO: 41092 - DNA, 15 bp, Homo sapiens
aacgctatcagaagt

SEQ ID NO: 41093 - DNA, 15 bp, Homo sapiens
acgctatcagaagtt

SEQ ID NO: 41094 - DNA, 15 bp, Homo sapiens
cgctatcagaagtta

SEQ ID NO: 41095 - DNA, 15 bp, Homo sapiens
gctatcagaagttaa

SEQ ID NO: 41096 - DNA, 15 bp, Homo sapiens
ctatcagaagttaaa

SEQ ID NO: 41097 - DNA, 15 bp, Homo sapiens
tatcagaagttaaaa

SEQ ID NO: 41098 - DNA, 15 bp, Homo sapiens
atcagaagttaaaag

SEQ ID NO: 41099 - DNA, 15 bp, Homo sapiens
tcagaagttaaaagc

SEQ ID NO: 41100 - DNA, 15 bp, Homo sapiens
cagaagttaaaagca

SEQ ID NO: 41101 - DNA, 15 bp, Homo sapiens
agaagttaaaagcag

SEQ ID NO: 41102 - DNA, 15 bp, Homo sapiens
gaagttaaaagcagt

SEQ ID NO: 41103 - DNA, 15 bp, Homo sapiens
aagttaaaagcagta

SEQ ID NO: 41104 - DNA, 15 bp, Homo sapiens
agttaaaagcagtaa

SEQ ID NO: 41105 - DNA, 15 bp, Homo sapiens
gttaaaagcagtaaa

SEQ ID NO: 41106 - DNA, 15 bp, Homo sapiens
ttaaaagcagtaaaa

SEQ ID NO: 41107 - DNA, 15 bp, Homo sapiens
taaaagcagtaaaac

SEQ ID NO: 41108 - DNA, 15 bp, Homo sapiens
aaaagcagtaaaaca

SEQ ID NO: 41109 - DNA, 15 bp, Homo sapiens
aaagcagtaaaacag

SEQ ID NO: 41110 - DNA, 15 bp, Homo sapiens
aagcagtaaaacaga

SEQ ID NO: 41111 - DNA, 15 bp, Homo sapiens
agcagtaaaacagat

SEQ ID NO: 41112 - DNA, 15 bp, Homo sapiens
gcagtaaaacagata

SEQ ID NO: 41113 - DNA, 15 bp, Homo sapiens
cagtaaaacagatat

SEQ ID NO: 41114 - DNA, 15 bp, Homo sapiens
agtaaaacagatata

SEQ ID NO: 41115 - DNA, 15 bp, Homo sapiens
gtaaaacagatatag

SEQ ID NO: 41116 - DNA, 15 bp, Homo sapiens
taaaacagatatagt

SEQ ID NO: 41117 - DNA, 15 bp, Homo sapiens
aaaacagatatagta

SEQ ID NO: 41118 - DNA, 15 bp, Homo sapiens
aaacagatatagtac

SEQ ID NO: 41119 - DNA, 15 bp, Homo sapiens
aacagatatagtact

SEQ ID NO: 41120 - DNA, 15 bp, Homo sapiens
acagatatagtacta

SEQ ID NO: 41121 - DNA, 15 bp, Homo sapiens
cagatatagtactaa

SEQ ID NO: 41122 - DNA, 15 bp, Homo sapiens
agatatagtactaac

SEQ ID NO: 41123 - DNA, 15 bp, Homo sapiens
gatatagtactaaca

SEQ ID NO: 41124 - DNA, 15 bp, Homo sapiens
atatagtactaacaa

SEQ ID NO: 41125 - DNA, 15 bp, Homo sapiens
tatagtactaacaag

SEQ ID NO: 41126 - DNA, 15 bp, Homo sapiens
atagtactaacaaga

SEQ ID NO: 41127 - DNA, 15 bp, Homo sapiens
tagtactaacaagaa

SEQ ID NO: 41128 - DNA, 15 bp, Homo sapiens
agtactaacaagaac

SEQ ID NO: 41129 - DNA, 15 bp, Homo sapiens
gtactaacaagaacg

SEQ ID NO: 41130 - DNA, 15 bp, Homo sapiens
tactaacaagaacga

SEQ ID NO: 41131 - DNA, 15 bp, Homo sapiens
actaacaagaacgaa

SEQ ID NO: 41132 - DNA, 15 bp, Homo sapiens
ctaacaagaacgaag

SEQ ID NO: 41133 - DNA, 15 bp, Homo sapiens
taacaagaacgaaga

SEQ ID NO: 41134 - DNA, 15 bp, Homo sapiens
aacaagaacgaagat

SEQ ID NO: 41135 - DNA, 15 bp, Homo sapiens
acaagaacgaagata

SEQ ID NO: 41136 - DNA, 15 bp, Homo sapiens
caagaacgaagatac

SEQ ID NO: 41137 - DNA, 15 bp, Homo sapiens
aagaacgaagatact

SEQ ID NO: 41138 - DNA, 15 bp, Homo sapiens
agaacgaagatactt

SEQ ID NO: 41139 - DNA, 15 bp, Homo sapiens
gaacgaagatactta

SEQ ID NO: 41140 - DNA, 15 bp, Homo sapiens
aacgaagatacttac

SEQ ID NO: 41141 - DNA, 15 bp, Homo sapiens
acgaagatacttact

SEQ ID NO: 41142 - DNA, 15 bp, Homo sapiens
cgaagatacttactg

SEQ ID NO: 41143 - DNA, 15 bp, Homo sapiens
gaagatacttactgt

SEQ ID NO: 41144 - DNA, 15 bp, Homo sapiens
aagatacttactgtc

SEQ ID NO: 41145 - DNA, 15 bp, Homo sapiens
agatacttactgtct

SEQ ID NO: 41146 - DNA, 15 bp, Homo sapiens
gatacttactgtcta

SEQ ID NO: 41147 - DNA, 15 bp, Homo sapiens
atacttactgtctaa

SEQ ID NO: 41148 - DNA, 15 bp, Homo sapiens
tacttactgtctaaa

SEQ ID NO: 41149 - DNA, 15 bp, Homo sapiens
acttactgtctaaaa

SEQ ID NO: 41150 - DNA, 15 bp, Homo sapiens
cttactgtctaaaat

SEQ ID NO: 41151 - DNA, 15 bp, Homo sapiens
ttactgtctaaaatg

SEQ ID NO: 41152 - DNA, 15 bp, Homo sapiens
tactgtctaaaatgt

SEQ ID NO: 41153 - DNA, 15 bp, Homo sapiens
actgtctaaaatgta

SEQ ID NO: 41154 - DNA, 15 bp, Homo sapiens
ctgtctaaaatgtaa

SEQ ID NO: 41155 - DNA, 15 bp, Homo sapiens
tgtctaaaatgtaaa

SEQ ID NO: 41156 - DNA, 15 bp, Homo sapiens
gtctaaaatgtaaac

SEQ ID NO: 41157 - DNA, 15 bp, Homo sapiens
tctaaaatgtaaacg

SEQ ID NO: 41158 - DNA, 15 bp, Homo sapiens
ctaaaatgtaaacgg

SEQ ID NO: 41159 - DNA, 15 bp, Homo sapiens
taaaatgtaaacgga

SEQ ID NO: 41160 - DNA, 15 bp, Homo sapiens
aaaatgtaaacggaa

SEQ ID NO: 41161 - DNA, 15 bp, Homo sapiens
aaatgtaaacggaat

SEQ ID NO: 41162 - DNA, 15 bp, Homo sapiens
aatgtaaacggaatg

SEQ ID NO: 41163 - DNA, 15 bp, Homo sapiens
atgtaaacggaatgt

SEQ ID NO: 41164 - DNA, 15 bp, Homo sapiens
tgtaaacggaatgtt

SEQ ID NO: 41165 - DNA, 15 bp, Homo sapiens
gtaaacggaatgttt

SEQ ID NO: 41166 - DNA, 15 bp, Homo sapiens
taaacggaatgtttt

SEQ ID NO: 41167 - DNA, 15 bp, Homo sapiens
aaacggaatgttttg

SEQ ID NO: 41168 - DNA, 15 bp, Homo sapiens
aacggaatgttttgg

SEQ ID NO: 41169 - DNA, 15 bp, Homo sapiens
acggaatgttttggt

SEQ ID NO: 41170 - DNA, 15 bp, Homo sapiens
cggaatgttttggtt

SEQ ID NO: 41171 - DNA, 15 bp, Homo sapiens
ggaatgttttggttc

SEQ ID NO: 41172 - DNA, 15 bp, Homo sapiens
gaatgttttggttca

SEQ ID NO: 41173 - DNA, 15 bp, Homo sapiens
aatgttttggttcaa

SEQ ID NO: 41174 - DNA, 15 bp, Homo sapiens
atgttttggttcaaa

SEQ ID NO: 41175 - DNA, 15 bp, Homo sapiens
tgttttggttcaaat

SEQ ID NO: 41176 - DNA, 15 bp, Homo sapiens
gttttggttcaaatt

SEQ ID NO: 41177 - DNA, 15 bp, Homo sapiens
ttttggttcaaattt

SEQ ID NO: 41178 - DNA, 15 bp, Homo sapiens
tttggttcaaatttt

SEQ ID NO: 41179 - DNA, 15 bp, Homo sapiens
ttggttcaaattttt

SEQ ID NO: 41180 - DNA, 15 bp, Homo sapiens
tggttcaaatttttg

SEQ ID NO: 41181 - DNA, 15 bp, Homo sapiens
ggttcaaatttttgt

SEQ ID NO: 41182 - DNA, 15 bp, Homo sapiens
gttcaaatttttgtt

SEQ ID NO: 41183 - DNA, 15 bp, Homo sapiens
ttcaaatttttgttg

SEQ ID NO: 41184 - DNA, 15 bp, Homo sapiens
tcaaatttttgttgt

SEQ ID NO: 41185 - DNA, 15 bp, Homo sapiens
caaatttttgttgtg

SEQ ID NO: 41186 - DNA, 15 bp, Homo sapiens
aaatttttgttgtgt

SEQ ID NO: 41187 - DNA, 15 bp, Homo sapiens
aatttttgttgtgtg

SEQ ID NO: 41188 - DNA, 15 bp, Homo sapiens
atttttgttgtgtgt

SEQ ID NO: 41189 - DNA, 15 bp, Homo sapiens
tttttgttgtgtgtg

SEQ ID NO: 41190 - DNA, 15 bp, Homo sapiens
ttttgttgtgtgtgt

SEQ ID NO: 41191 - DNA, 15 bp, Homo sapiens
tttgttgtgtgtgtg

SEQ ID NO: 41192 - DNA, 15 bp, Homo sapiens
ttgttgtgtgtgtgt

SEQ ID NO: 41193 - DNA, 15 bp, Homo sapiens
tgttgtgtgtgtgtg

SEQ ID NO: 41194 - DNA, 15 bp, Homo sapiens
gttgtgtgtgtgtgt

SEQ ID NO: 41195 - DNA, 15 bp, Homo sapiens
gtgtgtgtgtgtttt

SEQ ID NO: 41196 - DNA, 15 bp, Homo sapiens
tgtgtgtgtgttttt

SEQ ID NO: 41197 - DNA, 15 bp, Homo sapiens
gtgtgtgtgtttttt

SEQ ID NO: 41198 - DNA, 15 bp, Homo sapiens
tgtgtgtgttttttt

SEQ ID NO: 41199 - DNA, 15 bp, Homo sapiens
gtgtgtgtttttttt

SEQ ID NO: 41200 - DNA, 15 bp, Homo sapiens
tgtgtgttttttttc

SEQ ID NO: 41201 - DNA, 15 bp, Homo sapiens
gtgtgttttttttct

SEQ ID NO: 41202 - DNA, 15 bp, Homo sapiens
tgtgttttttttctg

SEQ ID NO: 41203 - DNA, 15 bp, Homo sapiens
gtgttttttttctgt

SEQ ID NO: 41204 - DNA, 15 bp, Homo sapiens
tgttttttttctgtt

SEQ ID NO: 41205 - DNA, 15 bp, Homo sapiens
gttttttttctgttt

SEQ ID NO: 41206 - DNA, 15 bp, Homo sapiens
ttttttttctgtttt

SEQ ID NO: 41207 - DNA, 15 bp, Homo sapiens
tttttttctgttttc

SEQ ID NO: 41208 - DNA, 15 bp, Homo sapiens
ttttttctgttttct

SEQ ID NO: 41209 - DNA, 15 bp, Homo sapiens
tttttctgttttctg

SEQ ID NO: 41210 - DNA, 15 bp, Homo sapiens
ttttctgttttctga

SEQ ID NO: 41211 - DNA, 15 bp, Homo sapiens
tttctgttttctgaa

SEQ ID NO: 41212 - DNA, 15 bp, Homo sapiens
ttctgttttctgaaa

SEQ ID NO: 41213 - DNA, 15 bp, Homo sapiens
tctgttttctgaaag

SEQ ID NO: 41214 - DNA, 15 bp, Homo sapiens
ctgttttctgaaaga

SEQ ID NO: 41215 - DNA, 15 bp, Homo sapiens
tgttttctgaaagag

SEQ ID NO: 41216 - DNA, 15 bp, Homo sapiens
gttttctgaaagagg

SEQ ID NO: 41217 - DNA, 15 bp, Homo sapiens
ttttctgaaagagga

SEQ ID NO: 41218 - DNA, 15 bp, Homo sapiens
tttctgaaagaggac

SEQ ID NO: 41219 - DNA, 15 bp, Homo sapiens
ttctgaaagaggaca

SEQ ID NO: 41220 - DNA, 15 bp, Homo sapiens
tctgaaagaggacag

SEQ ID NO: 41221 - DNA, 15 bp, Homo sapiens
ctgaaagaggacagt

SEQ ID NO: 41222 - DNA, 15 bp, Homo sapiens
tgaaagaggacagtt

SEQ ID NO: 41223 - DNA, 15 bp, Homo sapiens
gaaagaggacagttt

SEQ ID NO: 41224 - DNA, 15 bp, Homo sapiens
aaagaggacagttta

SEQ ID NO: 41225 - DNA, 15 bp, Homo sapiens
aagaggacagtttat

SEQ ID NO: 41226 - DNA, 15 bp, Homo sapiens
agaggacagtttatt

SEQ ID NO: 41227 - DNA, 15 bp, Homo sapiens
gaggacagtttatta

SEQ ID NO: 41228 - DNA, 15 bp, Homo sapiens
aggacagtttattat

SEQ ID NO: 41229 - DNA, 15 bp, Homo sapiens
ggacagtttattatc

SEQ ID NO: 41230 - DNA, 15 bp, Homo sapiens
gacagtttattatca

SEQ ID NO: 41231 - DNA, 15 bp, Homo sapiens
acagtttattatcaa

SEQ ID NO: 41232 - DNA, 15 bp, Homo sapiens
cagtttattatcaat

SEQ ID NO: 41233 - DNA, 15 bp, Homo sapiens
agtttattatcaatt

SEQ ID NO: 41234 - DNA, 15 bp, Homo sapiens
gtttattatcaattc

SEQ ID NO: 41235 - DNA, 15 bp, Homo sapiens
tttattatcaattca

SEQ ID NO: 41236 - DNA, 15 bp, Homo sapiens
ttattatcaattcac

SEQ ID NO: 41237 - DNA, 15 bp, Homo sapiens
tattatcaattcaca

SEQ ID NO: 41238 - DNA, 15 bp, Homo sapiens
attatcaattcacaa

SEQ ID NO: 41239 - DNA, 15 bp, Homo sapiens
ttatcaattcacaat

SEQ ID NO: 41240 - DNA, 15 bp, Homo sapiens
tatcaattcacaatt

SEQ ID NO: 41241 - DNA, 15 bp, Homo sapiens
atcaattcacaatta

SEQ ID NO: 41242 - DNA, 15 bp, Homo sapiens
tcaattcacaattaa

SEQ ID NO: 41243 - DNA, 15 bp, Homo sapiens
caattcacaattaaa

SEQ ID NO: 41244 - DNA, 15 bp, Homo sapiens
aattcacaattaaag

SEQ ID NO: 41245 - DNA, 15 bp, Homo sapiens
attcacaattaaagc

SEQ ID NO: 41246 - DNA, 15 bp, Homo sapiens
ttcacaattaaagca

SEQ ID NO: 41247 - DNA, 15 bp, Homo sapiens
tcacaattaaagcag

SEQ ID NO: 41248 - DNA, 15 bp, Homo sapiens
cacaattaaagcagc

SEQ ID NO: 41249 - DNA, 15 bp, Homo sapiens
acaattaaagcagca

SEQ ID NO: 41250 - DNA, 15 bp, Homo sapiens
caattaaagcagcat

SEQ ID NO: 41251 - DNA, 15 bp, Homo sapiens
aattaaagcagcatg

SEQ ID NO: 41252 - DNA, 15 bp, Homo sapiens
attaaagcagcatgc

SEQ ID NO: 41253 - DNA, 15 bp, Homo sapiens
ttaaagcagcatgca

SEQ ID NO: 41254 - DNA, 15 bp, Homo sapiens
taaagcagcatgcaa

SEQ ID NO: 41255 - DNA, 15 bp, Homo sapiens
aaagcagcatgcaat

SEQ ID NO: 41256 - DNA, 15 bp, Homo sapiens
aagcagcatgcaatt

SEQ ID NO: 41257 - DNA, 15 bp, Homo sapiens
agcagcatgcaattt

SEQ ID NO: 41258 - DNA, 15 bp, Homo sapiens
gcagcatgcaattta

SEQ ID NO: 41259 - DNA, 15 bp, Homo sapiens
cagcatgcaatttat

SEQ ID NO: 41260 - DNA, 15 bp, Homo sapiens
agcatgcaatttatt

SEQ ID NO: 41261 - DNA, 15 bp, Homo sapiens
gcatgcaatttatta

SEQ ID NO: 41262 - DNA, 15 bp, Homo sapiens
catgcaatttattat

SEQ ID NO: 41263 - DNA, 15 bp, Homo sapiens
atgcaatttattatt

SEQ ID NO: 41264 - DNA, 15 bp, Homo sapiens
tgcaatttattattt

SEQ ID NO: 41265 - DNA, 15 bp, Homo sapiens
gcaatttattatttt

SEQ ID NO: 41266 - DNA, 15 bp, Homo sapiens
caatttattattttt

SEQ ID NO: 41267 - DNA, 15 bp, Homo sapiens
aatttattatttttt

SEQ ID NO: 41268 - DNA, 15 bp, Homo sapiens
atttattattttttt

SEQ ID NO: 41269 - DNA, 15 bp, Homo sapiens
tttattatttttttt

SEQ ID NO: 41270 - DNA, 15 bp, Homo sapiens
ttattatttttttta

SEQ ID NO: 41271 - DNA, 15 bp, Homo sapiens
tattattttttttaa

SEQ ID NO: 41272 - DNA, 15 bp, Homo sapiens
attattttttttaac

SEQ ID NO: 41273 - DNA, 15 bp, Homo sapiens
ttattttttttaact

SEQ ID NO: 41274 - DNA, 15 bp, Homo sapiens
tattttttttaactt

SEQ ID NO: 41275 - DNA, 15 bp, Homo sapiens
attttttttaacttt

SEQ ID NO: 41276 - DNA, 15 bp, Homo sapiens
ttttttttaactttt

SEQ ID NO: 41277 - DNA, 15 bp, Homo sapiens
tttttttaacttttt

SEQ ID NO: 41278 - DNA, 15 bp, Homo sapiens
ttttttaacttttta

SEQ ID NO: 41279 - DNA, 15 bp, Homo sapiens
tttttaactttttat

SEQ ID NO: 41280 - DNA, 15 bp, Homo sapiens
ttttaactttttatg

SEQ ID NO: 41281 - DNA, 15 bp, Homo sapiens
tttaactttttatgt

SEQ ID NO: 41282 - DNA, 15 bp, Homo sapiens
ttaactttttatgtt

SEQ ID NO: 41283 - DNA, 15 bp, Homo sapiens
taactttttatgttt

SEQ ID NO: 41284 - DNA, 15 bp, Homo sapiens
aactttttatgtttt

SEQ ID NO: 41285 - DNA, 15 bp, Homo sapiens
actttttatgttttc

SEQ ID NO: 41286 - DNA, 15 bp, Homo sapiens
ctttttatgttttca

SEQ ID NO: 41287 - DNA, 15 bp, Homo sapiens
tttttatgttttcag

SEQ ID NO: 41288 - DNA, 15 bp, Homo sapiens
ttttatgttttcagt

SEQ ID NO: 41289 - DNA, 15 bp, Homo sapiens
tttatgttttcagtt

SEQ ID NO: 41290 - DNA, 15 bp, Homo sapiens
ttatgttttcagttc

SEQ ID NO: 41291 - DNA, 15 bp, Homo sapiens
tatgttttcagttct

SEQ ID NO: 41292 - DNA, 15 bp, Homo sapiens
atgttttcagttctt

SEQ ID NO: 41293 - DNA, 15 bp, Homo sapiens
tgttttcagttcttg

SEQ ID NO: 41294 - DNA, 15 bp, Homo sapiens
gttttcagttcttgg

SEQ ID NO: 41295 - DNA, 15 bp, Homo sapiens
ttttcagttcttggc

SEQ ID NO: 41296 - DNA, 15 bp, Homo sapiens
tttcagttcttggca

SEQ ID NO: 41297 - DNA, 15 bp, Homo sapiens
ttcagttcttggcaa

SEQ ID NO: 41298 - DNA, 15 bp, Homo sapiens
tcagttcttggcaac

SEQ ID NO: 41299 - DNA, 15 bp, Homo sapiens
cagttcttggcaacg

SEQ ID NO: 41300 - DNA, 15 bp, Homo sapiens
agttcttggcaacgg

SEQ ID NO: 41301 - DNA, 15 bp, Homo sapiens
gttcttggcaacggc

SEQ ID NO: 41302 - DNA, 15 bp, Homo sapiens
ttcttggcaacggca

SEQ ID NO: 41303 - DNA, 15 bp, Homo sapiens
tcttggcaacggcaa

SEQ ID NO: 41304 - DNA, 15 bp, Homo sapiens
cttggcaacggcaac

SEQ ID NO: 41305 - DNA, 15 bp, Homo sapiens
ttggcaacggcaaca

SEQ ID NO: 41306 - DNA, 15 bp, Homo sapiens
tggcaacggcaacaa

SEQ ID NO: 41307 - DNA, 15 bp, Homo sapiens
ggcaacggcaacaaa

SEQ ID NO: 41308 - DNA, 15 bp, Homo sapiens
gcaacggcaacaaac

SEQ ID NO: 41309 - DNA, 15 bp, Homo sapiens
caacggcaacaaacc

SEQ ID NO: 41310 - DNA, 15 bp, Homo sapiens
aacggcaacaaacca

SEQ ID NO: 41311 - DNA, 15 bp, Homo sapiens
acggcaacaaaccac

SEQ ID NO: 41312 - DNA, 15 bp, Homo sapiens
cggcaacaaaccaca

SEQ ID NO: 41313 - DNA, 15 bp, Homo sapiens
ggcaacaaaccacaa

SEQ ID NO: 41314 - DNA, 15 bp, Homo sapiens
gcaacaaaccacaac

SEQ ID NO: 41315 - DNA, 15 bp, Homo sapiens
caacaaaccacaaca

SEQ ID NO: 41316 - DNA, 15 bp, Homo sapiens
aacaaaccacaacat

SEQ ID NO: 41317 - DNA, 15 bp, Homo sapiens
acaaaccacaacatt

SEQ ID NO: 41318 - DNA, 15 bp, Homo sapiens
caaaccacaacatta

SEQ ID NO: 41319 - DNA, 15 bp, Homo sapiens
aaaccacaacattat

SEQ ID NO: 41320 - DNA, 15 bp, Homo sapiens
aaccacaacattatc

SEQ ID NO: 41321 - DNA, 15 bp, Homo sapiens
accacaacattatca

SEQ ID NO: 41322 - DNA, 15 bp, Homo sapiens
ccacaacattatcaa

SEQ ID NO: 41323 - DNA, 15 bp, Homo sapiens
cacaacattatcaag

SEQ ID NO: 41324 - DNA, 15 bp, Homo sapiens
acaacattatcaagg

SEQ ID NO: 41325 - DNA, 15 bp, Homo sapiens
caacattatcaagga

SEQ ID NO: 41326 - DNA, 15 bp, Homo sapiens
aacattatcaaggaa

SEQ ID NO: 41327 - DNA, 15 bp, Homo sapiens
acattatcaaggaat

SEQ ID NO: 41328 - DNA, 15 bp, Homo sapiens
cattatcaaggaatg

SEQ ID NO: 41329 - DNA, 15 bp, Homo sapiens
attatcaaggaatgt

SEQ ID NO: 41330 - DNA, 15 bp, Homo sapiens
ttatcaaggaatgta

SEQ ID NO: 41331 - DNA, 15 bp, Homo sapiens
tatcaaggaatgtaa

SEQ ID NO: 41332 - DNA, 15 bp, Homo sapiens
atcaaggaatgtaat

SEQ ID NO: 41333 - DNA, 15 bp, Homo sapiens
tcaaggaatgtaatg

SEQ ID NO: 41334 - DNA, 15 bp, Homo sapiens
caaggaatgtaatgc

SEQ ID NO: 41335 - DNA, 15 bp, Homo sapiens
aaggaatgtaatgca

SEQ ID NO: 41336 - DNA, 15 bp, Homo sapiens
aggaatgtaatgcag

SEQ ID NO: 41337 - DNA, 15 bp, Homo sapiens
ggaatgtaatgcaga

SEQ ID NO: 41338 - DNA, 15 bp, Homo sapiens
gaatgtaatgcagac

SEQ ID NO: 41339 - DNA, 15 bp, Homo sapiens
aatgtaatgcagact

SEQ ID NO: 41340 - DNA, 15 bp, Homo sapiens
atgtaatgcagactt

SEQ ID NO: 41341 - DNA, 15 bp, Homo sapiens
tgtaatgcagacttt

SEQ ID NO: 41342 - DNA, 15 bp, Homo sapiens
gtaatgcagactttt

SEQ ID NO: 41343 - DNA, 15 bp, Homo sapiens
taatgcagacttttt

SEQ ID NO: 41344 - DNA, 15 bp, Homo sapiens
aatgcagacttttta

SEQ ID NO: 41345 - DNA, 15 bp, Homo sapiens
atgcagactttttaa

SEQ ID NO: 41346 - DNA, 15 bp, Homo sapiens
tgcagactttttaag

SEQ ID NO: 41347 - DNA, 15 bp, Homo sapiens
gcagactttttaagt

SEQ ID NO: 41348 - DNA, 15 bp, Homo sapiens
cagactttttaagtt

SEQ ID NO: 41349 - DNA, 15 bp, Homo sapiens
agactttttaagttg

SEQ ID NO: 41350 - DNA, 15 bp, Homo sapiens
gactttttaagttgt

SEQ ID NO: 41351 - DNA, 15 bp, Homo sapiens
actttttaagttgtg

SEQ ID NO: 41352 - DNA, 15 bp, Homo sapiens
ctttttaagttgtgc

SEQ ID NO: 41353 - DNA, 15 bp, Homo sapiens
tttttaagttgtgcg

SEQ ID NO: 41354 - DNA, 15 bp, Homo sapiens
ttttaagttgtgcgc

SEQ ID NO: 41355 - DNA, 15 bp, Homo sapiens
tttaagttgtgcgca

SEQ ID NO: 41356 - DNA, 15 bp, Homo sapiens
ttaagttgtgcgcaa

SEQ ID NO: 41357 - DNA, 15 bp, Homo sapiens
taagttgtgcgcaaa

SEQ ID NO: 41358 - DNA, 15 bp, Homo sapiens
aagttgtgcgcaaat

SEQ ID NO: 41359 - DNA, 15 bp, Homo sapiens
agttgtgcgcaaatg

SEQ ID NO: 41360 - DNA, 15 bp, Homo sapiens
gttgtgcgcaaatga

SEQ ID NO: 41361 - DNA, 15 bp, Homo sapiens
ttgtgcgcaaatgac

SEQ ID NO: 41362 - DNA, 15 bp, Homo sapiens
tgtgcgcaaatgact

SEQ ID NO: 41363 - DNA, 15 bp, Homo sapiens
gtgcgcaaatgactg

SEQ ID NO: 41364 - DNA, 15 bp, Homo sapiens
tgcgcaaatgactgt

SEQ ID NO: 41365 - DNA, 15 bp, Homo sapiens
gcgcaaatgactgtt

SEQ ID NO: 41366 - DNA, 15 bp, Homo sapiens
cgcaaatgactgttt

SEQ ID NO: 41367 - DNA, 15 bp, Homo sapiens
gcaaatgactgtttc

SEQ ID NO: 41368 - DNA, 15 bp, Homo sapiens
caaatgactgtttcc

SEQ ID NO: 41369 - DNA, 15 bp, Homo sapiens
aaatgactgtttccc

SEQ ID NO: 41370 - DNA, 15 bp, Homo sapiens
aatgactgtttccct

SEQ ID NO: 41371 - DNA, 15 bp, Homo sapiens
atgactgtttccctt

SEQ ID NO: 41372 - DNA, 15 bp, Homo sapiens
tgactgtttcccttc

SEQ ID NO: 41373 - DNA, 15 bp, Homo sapiens
gactgtttcccttct

SEQ ID NO: 41374 - DNA, 15 bp, Homo sapiens
actgtttcccttctg

SEQ ID NO: 41375 - DNA, 15 bp, Homo sapiens
ctgtttcccttctgg

SEQ ID NO: 41376 - DNA, 15 bp, Homo sapiens
tgtttcccttctggt

SEQ ID NO: 41377 - DNA, 15 bp, Homo sapiens
gtttcccttctggtc

SEQ ID NO: 41378 - DNA, 15 bp, Homo sapiens
tttcccttctggtca

SEQ ID NO: 41379 - DNA, 15 bp, Homo sapiens
ttcccttctggtcat

SEQ ID NO: 41380 - DNA, 15 bp, Homo sapiens
tcccttctggtcatg

SEQ ID NO: 41381 - DNA, 15 bp, Homo sapiens
cccttctggtcatgg

SEQ ID NO: 41382 - DNA, 15 bp, Homo sapiens
ccttctggtcatgga

SEQ ID NO: 41383 - DNA, 15 bp, Homo sapiens
cttctggtcatggac

SEQ ID NO: 41384 - DNA, 15 bp, Homo sapiens
ttctggtcatggaca

SEQ ID NO: 41385 - DNA, 15 bp, Homo sapiens
tctggtcatggacat

SEQ ID NO: 41386 - DNA, 15 bp, Homo sapiens
ctggtcatggacatg

SEQ ID NO: 41387 - DNA, 15 bp, Homo sapiens
tggtcatggacatgt

SEQ ID NO: 41388 - DNA, 15 bp, Homo sapiens
ggtcatggacatgtc

SEQ ID NO: 41389 - DNA, 15 bp, Homo sapiens
gtcatggacatgtcc

SEQ ID NO: 41390 - DNA, 15 bp, Homo sapiens
tcatggacatgtcca

SEQ ID NO: 41391 - DNA, 15 bp, Homo sapiens
catggacatgtccaa

SEQ ID NO: 41392 - DNA, 15 bp, Homo sapiens
atggacatgtccaat

SEQ ID NO: 41393 - DNA, 15 bp, Homo sapiens
tggacatgtccaata

SEQ ID NO: 41394 - DNA, 15 bp, Homo sapiens
ggacatgtccaataa

SEQ ID NO: 41395 - DNA, 15 bp, Homo sapiens
gacatgtccaataaa

SEQ ID NO: 41396 - DNA, 15 bp, Homo sapiens
acatgtccaataaat

SEQ ID NO: 41397 - DNA, 15 bp, Homo sapiens
catgtccaataaata

SEQ ID NO: 41398 - DNA, 15 bp, Homo sapiens
atgtccaataaatag

SEQ ID NO: 41399 - DNA, 15 bp, Homo sapiens
tgtccaataaataga

SEQ ID NO: 41400 - DNA, 15 bp, Homo sapiens
gtccaataaatagat

SEQ ID NO: 41401 - DNA, 15 bp, Homo sapiens
tccaataaatagatt

SEQ ID NO: 41402 - DNA, 15 bp, Homo sapiens
ccaataaatagattg

SEQ ID NO: 41403 - DNA, 15 bp, Homo sapiens
caataaatagattgt

SEQ ID NO: 41404 - DNA, 15 bp, Homo sapiens
aataaatagattgta

SEQ ID NO: 41405 - DNA, 15 bp, Homo sapiens
ataaatagattgtag

SEQ ID NO: 41406 - DNA, 15 bp, Homo sapiens
taaatagattgtaga

SEQ ID NO: 41407 - DNA, 15 bp, Homo sapiens
aaatagattgtagaa

SEQ ID NO: 41408 - DNA, 15 bp, Homo sapiens
aatagattgtagaac

SEQ ID NO: 41409 - DNA, 15 bp, Homo sapiens
atagattgtagaacc

SEQ ID NO: 41410 - DNA, 15 bp, Homo sapiens
tagattgtagaacca

SEQ ID NO: 41411 - DNA, 15 bp, Homo sapiens
agattgtagaaccac

SEQ ID NO: 41412 - DNA, 15 bp, Homo sapiens
gattgtagaaccact

SEQ ID NO: 41413 - DNA, 15 bp, Homo sapiens
attgtagaaccactg

SEQ ID NO: 41414 - DNA, 15 bp, Homo sapiens
ttgtagaaccactgt

SEQ ID NO: 41415 - DNA, 15 bp, Homo sapiens
tgtagaaccactgta

SEQ ID NO: 41416 - DNA, 15 bp, Homo sapiens
gtagaaccactgtac

SEQ ID NO: 41417 - DNA, 15 bp, Homo sapiens
tagaaccactgtact

SEQ ID NO: 41418 - DNA, 15 bp, Homo sapiens
agaaccactgtactg

SEQ ID NO: 41419 - DNA, 15 bp, Homo sapiens
gaaccactgtactgt

SEQ ID NO: 41420 - DNA, 15 bp, Homo sapiens
aaccactgtactgta

SEQ ID NO: 41421 - DNA, 15 bp, Homo sapiens
accactgtactgtat

SEQ ID NO: 41422 - DNA, 15 bp, Homo sapiens
ccactgtactgtata

SEQ ID NO: 41423 - DNA, 15 bp, Homo sapiens
cactgtactgtataa

SEQ ID NO: 41424 - DNA, 15 bp, Homo sapiens
actgtactgtataaa

SEQ ID NO: 41425 - DNA, 15 bp, Homo sapiens
ctgtactgtataaac

SEQ ID NO: 41426 - DNA, 15 bp, Homo sapiens
tgtactgtataaact

SEQ ID NO: 41427 - DNA, 15 bp, Homo sapiens
gtactgtataaactt

SEQ ID NO: 41428 - DNA, 15 bp, Homo sapiens
tactgtataaacttc

SEQ ID NO: 41429 - DNA, 15 bp, Homo sapiens
actgtataaacttca

SEQ ID NO: 41430 - DNA, 15 bp, Homo sapiens
ctgtataaacttcat

SEQ ID NO: 41431 - DNA, 15 bp, Homo sapiens
tgtataaacttcatt

SEQ ID NO: 41432 - DNA, 15 bp, Homo sapiens
gtataaacttcattt

SEQ ID NO: 41433 - DNA, 15 bp, Homo sapiens
tataaacttcattta

SEQ ID NO: 41434 - DNA, 15 bp, Homo sapiens
ataaacttcatttat

SEQ ID NO: 41435 - DNA, 15 bp, Homo sapiens
taaacttcatttata

SEQ ID NO: 41436 - DNA, 15 bp, Homo sapiens
aaacttcatttatac

SEQ ID NO: 41437 - DNA, 15 bp, Homo sapiens
aacttcatttataca

SEQ ID NO: 41438 - DNA, 15 bp, Homo sapiens
acttcatttatacat

SEQ ID NO: 41439 - DNA, 15 bp, Homo sapiens
cttcatttatacatg

SEQ ID NO: 41440 - DNA, 15 bp, Homo sapiens
ttcatttatacatgc

SEQ ID NO: 41441 - DNA, 15 bp, Homo sapiens
tcatttatacatgca

SEQ ID NO: 41442 - DNA, 15 bp, Homo sapiens
catttatacatgcag

SEQ ID NO: 41443 - DNA, 15 bp, Homo sapiens
atttatacatgcagt

SEQ ID NO: 41444 - DNA, 15 bp, Homo sapiens
tttatacatgcagtt

SEQ ID NO: 41445 - DNA, 15 bp, Homo sapiens
ttatacatgcagttc

SEQ ID NO: 41446 - DNA, 15 bp, Homo sapiens
tatacatgcagttca

SEQ ID NO: 41447 - DNA, 15 bp, Homo sapiens
atacatgcagttcat

SEQ ID NO: 41448 - DNA, 15 bp, Homo sapiens
tacatgcagttcata

SEQ ID NO: 41449 - DNA, 15 bp, Homo sapiens
acatgcagttcataa

SEQ ID NO: 41450 - DNA, 15 bp, Homo sapiens
catgcagttcataaa

SEQ ID NO: 41451 - DNA, 15 bp, Homo sapiens
atgcagttcataaaa

SEQ ID NO: 41452 - DNA, 15 bp, Homo sapiens
tgcagttcataaaat

SEQ ID NO: 41453 - DNA, 15 bp, Homo sapiens
gcagttcataaaatt

SEQ ID NO: 41454 - DNA, 15 bp, Homo sapiens
cagttcataaaatta

SEQ ID NO: 41455 - DNA, 15 bp, Homo sapiens
agttcataaaattat

SEQ ID NO: 41456 - DNA, 15 bp, Homo sapiens
gttcataaaattatt

SEQ ID NO: 41457 - DNA, 15 bp, Homo sapiens
ttcataaaattattt

SEQ ID NO: 41458 - DNA, 15 bp, Homo sapiens
tcataaaattatttt

SEQ ID NO: 41459 - DNA, 15 bp, Homo sapiens
cataaaattattttt

SEQ ID NO: 41460 - DNA, 15 bp, Homo sapiens
ataaaattatttttt

SEQ ID NO: 41461 - DNA, 15 bp, Homo sapiens
taaaattattttttt

SEQ ID NO: 41462 - DNA, 15 bp, Homo sapiens
aaaattatttttttc

SEQ ID NO: 41463 - DNA, 15 bp, Homo sapiens
aaattatttttttct

SEQ ID NO: 41464 - DNA, 15 bp, Homo sapiens
aattatttttttctt

SEQ ID NO: 41465 - DNA, 15 bp, Homo sapiens
attatttttttctta

SEQ ID NO: 41466 - DNA, 15 bp, Homo sapiens
ttatttttttcttaa

SEQ ID NO: 41467 - DNA, 15 bp, Homo sapiens
tatttttttcttaac

SEQ ID NO: 41468 - DNA, 15 bp, Homo sapiens
atttttttcttaact

SEQ ID NO: 41469 - DNA, 15 bp, Homo sapiens
tttttttcttaactg

SEQ ID NO: 41470 - DNA, 15 bp, Homo sapiens
ttttttcttaactga

SEQ ID NO: 41471 - DNA, 15 bp, Homo sapiens
tttttcttaactgaa

SEQ ID NO: 41472 - DNA, 15 bp, Homo sapiens
ttttcttaactgaat

SEQ ID NO: 41473 - DNA, 15 bp, Homo sapiens
tttcttaactgaata

SEQ ID NO: 41474 - DNA, 15 bp, Homo sapiens
ttcttaactgaataa

SEQ ID NO: 41475 - DNA, 15 bp, Homo sapiens
tcttaactgaataat

SEQ ID NO: 41476 - DNA, 15 bp, Homo sapiens
cttaactgaataatt

SEQ ID NO: 41477 - DNA, 15 bp, Homo sapiens
ttaactgaataattt

SEQ ID NO: 41478 - DNA, 15 bp, Homo sapiens
taactgaataattta

SEQ ID NO: 41479 - DNA, 15 bp, Homo sapiens
aactgaataatttac

SEQ ID NO: 41480 - DNA, 15 bp, Homo sapiens
actgaataatttacc

SEQ ID NO: 41481 - DNA, 15 bp, Homo sapiens
ctgaataatttaccc

SEQ ID NO: 41482 - DNA, 15 bp, Homo sapiens
tgaataatttaccct

SEQ ID NO: 41483 - DNA, 15 bp, Homo sapiens
gaataatttaccctg

SEQ ID NO: 41484 - DNA, 15 bp, Homo sapiens
aataatttaccctgt

SEQ ID NO: 41485 - DNA, 15 bp, Homo sapiens
ataatttaccctgtt

SEQ ID NO: 41486 - DNA, 15 bp, Homo sapiens
taatttaccctgtta

SEQ ID NO: 41487 - DNA, 15 bp, Homo sapiens
aatttaccctgttat

SEQ ID NO: 41488 - DNA, 15 bp, Homo sapiens
atttaccctgttatg

SEQ ID NO: 41489 - DNA, 15 bp, Homo sapiens
tttaccctgttatgt

SEQ ID NO: 41490 - DNA, 15 bp, Homo sapiens
ttaccctgttatgta

SEQ ID NO: 41491 - DNA, 15 bp, Homo sapiens
taccctgttatgtat

SEQ ID NO: 41492 - DNA, 15 bp, Homo sapiens
accctgttatgtata

SEQ ID NO: 41493 - DNA, 15 bp, Homo sapiens
ccctgttatgtatat

SEQ ID NO: 41494 - DNA, 15 bp, Homo sapiens
cctgttatgtatata

SEQ ID NO: 41495 - DNA, 15 bp, Homo sapiens
ctgttatgtatatat

SEQ ID NO: 41496 - DNA, 15 bp, Homo sapiens
tgttatgtatatata

SEQ ID NO: 41497 - DNA, 15 bp, Homo sapiens
gttatgtatatatac

SEQ ID NO: 41498 - DNA, 15 bp, Homo sapiens
ttatgtatatataca

SEQ ID NO: 41499 - DNA, 15 bp, Homo sapiens
tatgtatatatacaa

SEQ ID NO: 41500 - DNA, 15 bp, Homo sapiens
atgtatatatacaaa

SEQ ID NO: 41501 - DNA, 15 bp, Homo sapiens
tgtatatatacaaat

SEQ ID NO: 41502 - DNA, 15 bp, Homo sapiens
gtatatatacaaata

SEQ ID NO: 41503 - DNA, 15 bp, Homo sapiens
tatatatacaaatag

SEQ ID NO: 41504 - DNA, 15 bp, Homo sapiens
atatatacaaataga

SEQ ID NO: 41505 - DNA, 15 bp, Homo sapiens
tatatacaaatagat

SEQ ID NO: 41506 - DNA, 15 bp, Homo sapiens
atatacaaatagata

SEQ ID NO: 41507 - DNA, 15 bp, Homo sapiens
tatacaaatagataa

SEQ ID NO: 41508 - DNA, 15 bp, Homo sapiens
atacaaatagataat

SEQ ID NO: 41509 - DNA, 15 bp, Homo sapiens
tacaaatagataatt

SEQ ID NO: 41510 - DNA, 15 bp, Homo sapiens
acaaatagataattt

SEQ ID NO: 41511 - DNA, 15 bp, Homo sapiens
caaatagataatttt

SEQ ID NO: 41512 - DNA, 15 bp, Homo sapiens
aaatagataattttt

SEQ ID NO: 41513 - DNA, 15 bp, Homo sapiens
aatagataatttttg

SEQ ID NO: 41514 - DNA, 15 bp, Homo sapiens
atagataatttttgt

SEQ ID NO: 41515 - DNA, 15 bp, Homo sapiens
tagataatttttgtc

SEQ ID NO: 41516 - DNA, 15 bp, Homo sapiens
agataatttttgtct

SEQ ID NO: 41517 - DNA, 15 bp, Homo sapiens
gataatttttgtctc

SEQ ID NO: 41518 - DNA, 15 bp, Homo sapiens
ataatttttgtctca

SEQ ID NO: 41519 - DNA, 15 bp, Homo sapiens
taatttttgtctcaa

SEQ ID NO: 41520 - DNA, 15 bp, Homo sapiens
aatttttgtctcaat

SEQ ID NO: 41521 - DNA, 15 bp, Homo sapiens
atttttgtctcaata

SEQ ID NO: 41522 - DNA, 15 bp, Homo sapiens
tttttgtctcaatat

SEQ ID NO: 41523 - DNA, 15 bp, Homo sapiens
ttttgtctcaatata

SEQ ID NO: 41524 - DNA, 15 bp, Homo sapiens
tttgtctcaatataa

SEQ ID NO: 41525 - DNA, 15 bp, Homo sapiens
ttgtctcaatataat

SEQ ID NO: 41526 - DNA, 15 bp, Homo sapiens
tgtctcaatataatc

SEQ ID NO: 41527 - DNA, 15 bp, Homo sapiens
gtctcaatataatct

SEQ ID NO: 41528 - DNA, 15 bp, Homo sapiens
tctcaatataatcta

SEQ ID NO: 41529 - DNA, 15 bp, Homo sapiens
ctcaatataatctaa

SEQ ID NO: 41530 - DNA, 15 bp, Homo sapiens
tcaatataatctaat

SEQ ID NO: 41531 - DNA, 15 bp, Homo sapiens
caatataatctaatc

SEQ ID NO: 41532 - DNA, 15 bp, Homo sapiens
aatataatctaatct

SEQ ID NO: 41533 - DNA, 15 bp, Homo sapiens
atataatctaatcta

SEQ ID NO: 41534 - DNA, 15 bp, Homo sapiens
tataatctaatctat

SEQ ID NO: 41535 - DNA, 15 bp, Homo sapiens
ataatctaatctata

SEQ ID NO: 41536 - DNA, 15 bp, Homo sapiens
taatctaatctatac

SEQ ID NO: 41537 - DNA, 15 bp, Homo sapiens
aatctaatctataca

SEQ ID NO: 41538 - DNA, 15 bp, Homo sapiens
atctaatctatacaa

SEQ ID NO: 41539 - DNA, 15 bp, Homo sapiens
tctaatctatacaac

SEQ ID NO: 41540 - DNA, 15 bp, Homo sapiens
ctaatctatacaaca

SEQ ID NO: 41541 - DNA, 15 bp, Homo sapiens
taatctatacaacat

SEQ ID NO: 41542 - DNA, 15 bp, Homo sapiens
aatctatacaacata

SEQ ID NO: 41543 - DNA, 15 bp, Homo sapiens
atctatacaacataa

SEQ ID NO: 41544 - DNA, 15 bp, Homo sapiens
tctatacaacataaa

SEQ ID NO: 41545 - DNA, 15 bp, Homo sapiens
ctatacaacataaat

SEQ ID NO: 41546 - DNA, 15 bp, Homo sapiens
tatacaacataaatc

SEQ ID NO: 41547 - DNA, 15 bp, Homo sapiens
atacaacataaatcc

SEQ ID NO: 41548 - DNA, 15 bp, Homo sapiens
tacaacataaatcca

SEQ ID NO: 41549 - DNA, 15 bp, Homo sapiens
acaacataaatccac

SEQ ID NO: 41550 - DNA, 15 bp, Homo sapiens
caacataaatccact

SEQ ID NO: 41551 - DNA, 15 bp, Homo sapiens
aacataaatccacta

SEQ ID NO: 41552 - DNA, 15 bp, Homo sapiens
acataaatccactat

SEQ ID NO: 41553 - DNA, 15 bp, Homo sapiens
cataaatccactatc

SEQ ID NO: 41554 - DNA, 15 bp, Homo sapiens
ataaatccactatct

SEQ ID NO: 41555 - DNA, 15 bp, Homo sapiens
taaatccactatctt

SEQ ID NO: 41556 - DNA, 15 bp, Homo sapiens
aaatccactatcttc

SEQ ID NO: 41557 - DNA, 15 bp, Homo sapiens
aatccactatcttcc

SEQ ID NO: 41558 - DNA, 15 bp, Homo sapiens
atccactatcttccc

SEQ ID NO: 41559 - DNA, 15 bp, Homo sapiens
tccactatcttcccc

SEQ ID NO: 41560 - DNA, 15 bp, Homo sapiens
ccactatcttcccct

SEQ ID NO: 41561 - DNA, 15 bp, Homo sapiens
cactatcttcccctt

SEQ ID NO: 41562 - DNA, 15 bp, Homo sapiens
actatcttccccttt

SEQ ID NO: 41563 - DNA, 15 bp, Homo sapiens
ctatcttcccctttt

SEQ ID NO: 41564 - DNA, 15 bp, Homo sapiens
tatcttcccctttta

SEQ ID NO: 41565 - DNA, 15 bp, Homo sapiens
atcttccccttttaa

SEQ ID NO: 41566 - DNA, 15 bp, Homo sapiens
tcttccccttttaat

SEQ ID NO: 41567 - DNA, 15 bp, Homo sapiens
cttccccttttaatg

SEQ ID NO: 41568 - DNA, 15 bp, Homo sapiens
ttccccttttaatgg

SEQ ID NO: 41569 - DNA, 15 bp, Homo sapiens
tccccttttaatggt

SEQ ID NO: 41570 - DNA, 15 bp, Homo sapiens
ccccttttaatggtc

SEQ ID NO: 41571 - DNA, 15 bp, Homo sapiens
cccttttaatggtca

SEQ ID NO: 41572 - DNA, 15 bp, Homo sapiens
ccttttaatggtcaa

SEQ ID NO: 41573 - DNA, 15 bp, Homo sapiens
cttttaatggtcaat

SEQ ID NO: 41574 - DNA, 15 bp, Homo sapiens
ttttaatggtcaatg

SEQ ID NO: 41575 - DNA, 15 bp, Homo sapiens
tttaatggtcaatgt

SEQ ID NO: 41576 - DNA, 15 bp, Homo sapiens
ttaatggtcaatgta

SEQ ID NO: 41577 - DNA, 15 bp, Homo sapiens
taatggtcaatgtac

SEQ ID NO: 41578 - DNA, 15 bp, Homo sapiens
aatggtcaatgtaca

SEQ ID NO: 41579 - DNA, 15 bp, Homo sapiens
atggtcaatgtacat

SEQ ID NO: 41580 - DNA, 15 bp, Homo sapiens
tggtcaatgtacata

SEQ ID NO: 41581 - DNA, 15 bp, Homo sapiens
ggtcaatgtacatac

SEQ ID NO: 41582 - DNA, 15 bp, Homo sapiens
gtcaatgtacataca

SEQ ID NO: 41583 - DNA, 15 bp, Homo sapiens
tcaatgtacatacac

SEQ ID NO: 41584 - DNA, 15 bp, Homo sapiens
caatgtacatacaca

SEQ ID NO: 41585 - DNA, 15 bp, Homo sapiens
aatgtacatacacaa

SEQ ID NO: 41586 - DNA, 15 bp, Homo sapiens
atgtacatacacaag

SEQ ID NO: 41587 - DNA, 15 bp, Homo sapiens
tgtacatacacaaga

SEQ ID NO: 41588 - DNA, 15 bp, Homo sapiens
gtacatacacaagaa

SEQ ID NO: 41589 - DNA, 15 bp, Homo sapiens
tacatacacaagaag

SEQ ID NO: 41590 - DNA, 15 bp, Homo sapiens
acatacacaagaagt

SEQ ID NO: 41591 - DNA, 15 bp, Homo sapiens
catacacaagaagtg

SEQ ID NO: 41592 - DNA, 15 bp, Homo sapiens
atacacaagaagtgt

SEQ ID NO: 41593 - DNA, 15 bp, Homo sapiens
tacacaagaagtgtc

SEQ ID NO: 41594 - DNA, 15 bp, Homo sapiens
acacaagaagtgtct

SEQ ID NO: 41595 - DNA, 15 bp, Homo sapiens
cacaagaagtgtcta

SEQ ID NO: 41596 - DNA, 15 bp, Homo sapiens
acaagaagtgtctat

SEQ ID NO: 41597 - DNA, 15 bp, Homo sapiens
caagaagtgtctatc

SEQ ID NO: 41598 - DNA, 15 bp, Homo sapiens
aagaagtgtctatcc

SEQ ID NO: 41599 - DNA, 15 bp, Homo sapiens
agaagtgtctatcct

SEQ ID NO: 41600 - DNA, 15 bp, Homo sapiens
gaagtgtctatcctt

SEQ ID NO: 41601 - DNA, 15 bp, Homo sapiens
aagtgtctatcctta

SEQ ID NO: 41602 - DNA, 15 bp, Homo sapiens
agtgtctatccttat

SEQ ID NO: 41603 - DNA, 15 bp, Homo sapiens
gtgtctatccttatg

SEQ ID NO: 41604 - DNA, 15 bp, Homo sapiens
tgtctatccttatga

SEQ ID NO: 41605 - DNA, 15 bp, Homo sapiens
gtctatccttatgaa

SEQ ID NO: 41606 - DNA, 15 bp, Homo sapiens
tctatccttatgaat

SEQ ID NO: 41607 - DNA, 15 bp, Homo sapiens
ctatccttatgaatc

SEQ ID NO: 41608 - DNA, 15 bp, Homo sapiens
tatccttatgaatcg

SEQ ID NO: 41609 - DNA, 15 bp, Homo sapiens
atccttatgaatcgc

SEQ ID NO: 41610 - DNA, 15 bp, Homo sapiens
tccttatgaatcgcc

SEQ ID NO: 41611 - DNA, 15 bp, Homo sapiens
ccttatgaatcgcca

SEQ ID NO: 41612 - DNA, 15 bp, Homo sapiens
cttatgaatcgccag

SEQ ID NO: 41613 - DNA, 15 bp, Homo sapiens
ttatgaatcgccagc

SEQ ID NO: 41614 - DNA, 15 bp, Homo sapiens
tatgaatcgccagcc

SEQ ID NO: 41615 - DNA, 15 bp, Homo sapiens
atgaatcgccagcca

SEQ ID NO: 41616 - DNA, 15 bp, Homo sapiens
tgaatcgccagccaa

SEQ ID NO: 41617 - DNA, 15 bp, Homo sapiens
gaatcgccagccaat

SEQ ID NO: 41618 - DNA, 15 bp, Homo sapiens
aatcgccagccaatt

SEQ ID NO: 41619 - DNA, 15 bp, Homo sapiens
atcgccagccaattc

SEQ ID NO: 41620 - DNA, 15 bp, Homo sapiens
tcgccagccaattct

SEQ ID NO: 41621 - DNA, 15 bp, Homo sapiens
cgccagccaattctc

SEQ ID NO: 41622 - DNA, 15 bp, Homo sapiens
gccagccaattctct

SEQ ID NO: 41623 - DNA, 15 bp, Homo sapiens
ccagccaattctctt

SEQ ID NO: 41624 - DNA, 15 bp, Homo sapiens
cagccaattctcttt

SEQ ID NO: 41625 - DNA, 15 bp, Homo sapiens
agccaattctctttt

SEQ ID NO: 41626 - DNA, 15 bp, Homo sapiens
gccaattctcttttt

SEQ ID NO: 41627 - DNA, 15 bp, Homo sapiens
ccaattctctttttg

SEQ ID NO: 41628 - DNA, 15 bp, Homo sapiens
caattctctttttgc

SEQ ID NO: 41629 - DNA, 15 bp, Homo sapiens
aattctctttttgct

SEQ ID NO: 41630 - DNA, 15 bp, Homo sapiens
attctctttttgcta

SEQ ID NO: 41631 - DNA, 15 bp, Homo sapiens
ttctctttttgctat

SEQ ID NO: 41632 - DNA, 15 bp, Homo sapiens
tctctttttgctatc

SEQ ID NO: 41633 - DNA, 15 bp, Homo sapiens
ctctttttgctatcc

SEQ ID NO: 41634 - DNA, 15 bp, Homo sapiens
tctttttgctatcca

SEQ ID NO: 41635 - DNA, 15 bp, Homo sapiens
ctttttgctatccat

SEQ ID NO: 41636 - DNA, 15 bp, Homo sapiens
tttttgctatccatg

SEQ ID NO: 41637 - DNA, 15 bp, Homo sapiens
ttttgctatccatgg

SEQ ID NO: 41638 - DNA, 15 bp, Homo sapiens
tttgctatccatggt

SEQ ID NO: 41639 - DNA, 15 bp, Homo sapiens
ttgctatccatggta

SEQ ID NO: 41640 - DNA, 15 bp, Homo sapiens
tgctatccatggtaa

SEQ ID NO: 41641 - DNA, 15 bp, Homo sapiens
gctatccatggtaag

SEQ ID NO: 41642 - DNA, 15 bp, Homo sapiens
ctatccatggtaagg

SEQ ID NO: 41643 - DNA, 15 bp, Homo sapiens
tatccatggtaaggg

SEQ ID NO: 41644 - DNA, 15 bp, Homo sapiens
atccatggtaagggc

SEQ ID NO: 41645 - DNA, 15 bp, Homo sapiens
tccatggtaagggcc

SEQ ID NO: 41646 - DNA, 15 bp, Homo sapiens
ccatggtaagggccc

SEQ ID NO: 41647 - DNA, 15 bp, Homo sapiens
catggtaagggcccg

SEQ ID NO: 41648 - DNA, 15 bp, Homo sapiens
atggtaagggcccgc

SEQ ID NO: 41649 - DNA, 15 bp, Homo sapiens
tggtaagggcccgca

SEQ ID NO: 41650 - DNA, 15 bp, Homo sapiens
ggtaagggcccgcac

SEQ ID NO: 41651 - DNA, 15 bp, Homo sapiens
gtaagggcccgcacg

SEQ ID NO: 41652 - DNA, 15 bp, Homo sapiens
taagggcccgcacgt

SEQ ID NO: 41653 - DNA, 15 bp, Homo sapiens
aagggcccgcacgta

SEQ ID NO: 41654 - DNA, 15 bp, Homo sapiens
agggcccgcacgtac

SEQ ID NO: 41655 - DNA, 15 bp, Homo sapiens
gggcccgcacgtacg

SEQ ID NO: 41656 - DNA, 15 bp, Homo sapiens
ggcccgcacgtacga

SEQ ID NO: 41657 - DNA, 15 bp, Homo sapiens
gcccgcacgtacgac

SEQ ID NO: 41658 - DNA, 15 bp, Homo sapiens
cccgcacgtacgact

SEQ ID NO: 41659 - DNA, 15 bp, Homo sapiens
ccgcacgtacgactg

SEQ ID NO: 41660 - DNA, 15 bp, Homo sapiens
cgcacgtacgactgg

SEQ ID NO: 41661 - DNA, 15 bp, Homo sapiens
gcacgtacgactggg

SEQ ID NO: 41662 - DNA, 15 bp, Homo sapiens
cacgtacgactgggt

SEQ ID NO: 41663 - DNA, 15 bp, Homo sapiens
acgtacgactgggta

SEQ ID NO: 41664 - DNA, 15 bp, Homo sapiens
cgtacgactgggtag

SEQ ID NO: 41665 - DNA, 15 bp, Homo sapiens
gtacgactgggtagt

SEQ ID NO: 41666 - DNA, 15 bp, Homo sapiens
tacgactgggtagtt

SEQ ID NO: 41667 - DNA, 15 bp, Homo sapiens
acgactgggtagttc

SEQ ID NO: 41668 - DNA, 15 bp, Homo sapiens
cgactgggtagttcg

SEQ ID NO: 41669 - DNA, 15 bp, Homo sapiens
gactgggtagttcgg

SEQ ID NO: 41670 - DNA, 15 bp, Homo sapiens
actgggtagttcggc

SEQ ID NO: 41671 - DNA, 15 bp, Homo sapiens
ctgggtagttcggca

SEQ ID NO: 41672 - DNA, 15 bp, Homo sapiens
tgggtagttcggcac

SEQ ID NO: 41673 - DNA, 15 bp, Homo sapiens
gggtagttcggcact

SEQ ID NO: 41674 - DNA, 15 bp, Homo sapiens
ggtagttcggcactg

SEQ ID NO: 41675 - DNA, 15 bp, Homo sapiens
gtagttcggcactgg

SEQ ID NO: 41676 - DNA, 15 bp, Homo sapiens
tagttcggcactggg

SEQ ID NO: 41677 - DNA, 15 bp, Homo sapiens
agttcggcactggga

SEQ ID NO: 41678 - DNA, 15 bp, Homo sapiens
gttcggcactgggag

SEQ ID NO: 41679 - DNA, 15 bp, Homo sapiens
ttcggcactgggagt

SEQ ID NO: 41680 - DNA, 15 bp, Homo sapiens
tcggcactgggagtt

SEQ ID NO: 41681 - DNA, 15 bp, Homo sapiens
cggcactgggagttc

SEQ ID NO: 41682 - DNA, 15 bp, Homo sapiens
ggcactgggagttcc

SEQ ID NO: 41683 - DNA, 15 bp, Homo sapiens
gcactgggagttcca

SEQ ID NO: 41684 - DNA, 15 bp, Homo sapiens
cactgggagttccaa

SEQ ID NO: 41685 - DNA, 15 bp, Homo sapiens
actgggagttccaat

SEQ ID NO: 41686 - DNA, 15 bp, Homo sapiens
ctgggagttccaatg

SEQ ID NO: 41687 - DNA, 15 bp, Homo sapiens
tgggagttccaatgc

SEQ ID NO: 41688 - DNA, 15 bp, Homo sapiens
gggagttccaatgcc

SEQ ID NO: 41689 - DNA, 15 bp, Homo sapiens
ggagttccaatgcct

SEQ ID NO: 41690 - DNA, 15 bp, Homo sapiens
gagttccaatgcctt

SEQ ID NO: 41691 - DNA, 15 bp, Homo sapiens
agttccaatgccttt

SEQ ID NO: 41692 - DNA, 15 bp, Homo sapiens
gttccaatgcctttt

SEQ ID NO: 41693 - DNA, 15 bp, Homo sapiens
ttccaatgccttttg

SEQ ID NO: 41694 - DNA, 15 bp, Homo sapiens
tccaatgccttttgt

SEQ ID NO: 41695 - DNA, 15 bp, Homo sapiens
ccaatgccttttgtc

SEQ ID NO: 41696 - DNA, 15 bp, Homo sapiens
caatgccttttgtct

SEQ ID NO: 41697 - DNA, 15 bp, Homo sapiens
aatgccttttgtcta

SEQ ID NO: 41698 - DNA, 15 bp, Homo sapiens
atgccttttgtctat

SEQ ID NO: 41699 - DNA, 15 bp, Homo sapiens
tgccttttgtctatg

SEQ ID NO: 41700 - DNA, 15 bp, Homo sapiens
gccttttgtctatgc

SEQ ID NO: 41701 - DNA, 15 bp, Homo sapiens
ccttttgtctatgcc

SEQ ID NO: 41702 - DNA, 15 bp, Homo sapiens
cttttgtctatgccc

SEQ ID NO: 41703 - DNA, 15 bp, Homo sapiens
ttttgtctatgcccc

SEQ ID NO: 41704 - DNA, 15 bp, Homo sapiens
tttgtctatgcccct

SEQ ID NO: 41705 - DNA, 15 bp, Homo sapiens
ttgtctatgcccctg

SEQ ID NO: 41706 - DNA, 15 bp, Homo sapiens
tgtctatgcccctgc

SEQ ID NO: 41707 - DNA, 15 bp, Homo sapiens
gtctatgcccctgca

SEQ ID NO: 41708 - DNA, 15 bp, Homo sapiens
tctatgcccctgcag

SEQ ID NO: 41709 - DNA, 15 bp, Homo sapiens
ctatgcccctgcagc

SEQ ID NO: 41710 - DNA, 15 bp, Homo sapiens
tatgcccctgcagcc

SEQ ID NO: 41711 - DNA, 15 bp, Homo sapiens
atgcccctgcagcct

SEQ ID NO: 41712 - DNA, 15 bp, Homo sapiens
tgcccctgcagcctt

SEQ ID NO: 41713 - DNA, 15 bp, Homo sapiens
gcccctgcagccttc

SEQ ID NO: 41714 - DNA, 15 bp, Homo sapiens
cccctgcagccttct

SEQ ID NO: 41715 - DNA, 15 bp, Homo sapiens
ccctgcagccttctt

SEQ ID NO: 41716 - DNA, 15 bp, Homo sapiens
cctgcagccttcttt

SEQ ID NO: 41717 - DNA, 15 bp, Homo sapiens
ctgcagccttctttt

SEQ ID NO: 41718 - DNA, 15 bp, Homo sapiens
tgcagccttcttttg

SEQ ID NO: 41719 - DNA, 15 bp, Homo sapiens
gcagccttcttttgt

SEQ ID NO: 41720 - DNA, 15 bp, Homo sapiens
cagccttcttttgtg

SEQ ID NO: 41721 - DNA, 15 bp, Homo sapiens
agccttcttttgtgt

SEQ ID NO: 41722 - DNA, 15 bp, Homo sapiens
gccttcttttgtgta

SEQ ID NO: 41723 - DNA, 15 bp, Homo sapiens
ccttcttttgtgtaa

SEQ ID NO: 41724 - DNA, 15 bp, Homo sapiens
cttcttttgtgtaac

SEQ ID NO: 41725 - DNA, 15 bp, Homo sapiens
ttcttttgtgtaacc

SEQ ID NO: 41726 - DNA, 15 bp, Homo sapiens
tcttttgtgtaaccc

SEQ ID NO: 41727 - DNA, 15 bp, Homo sapiens
cttttgtgtaaccca

SEQ ID NO: 41728 - DNA, 15 bp, Homo sapiens
ttttgtgtaacccat

SEQ ID NO: 41729 - DNA, 15 bp, Homo sapiens
tttgtgtaacccatg

SEQ ID NO: 41730 - DNA, 15 bp, Homo sapiens
ttgtgtaacccatgg

SEQ ID NO: 41731 - DNA, 15 bp, Homo sapiens
tgtgtaacccatggg

SEQ ID NO: 41732 - DNA, 15 bp, Homo sapiens
gtgtaacccatggga

SEQ ID NO: 41733 - DNA, 15 bp, Homo sapiens
tgtaacccatgggat

SEQ ID NO: 41734 - DNA, 15 bp, Homo sapiens
gtaacccatgggatt

SEQ ID NO: 41735 - DNA, 15 bp, Homo sapiens
taacccatgggattg

SEQ ID NO: 41736 - DNA, 15 bp, Homo sapiens
aacccatgggattgc

SEQ ID NO: 41737 - DNA, 15 bp, Homo sapiens
acccatgggattgca

SEQ ID NO: 41738 - DNA, 15 bp, Homo sapiens
cccatgggattgcac

SEQ ID NO: 41739 - DNA, 15 bp, Homo sapiens
ccatgggattgcact

SEQ ID NO: 41740 - DNA, 15 bp, Homo sapiens
catgggattgcactt

SEQ ID NO: 41741 - DNA, 15 bp, Homo sapiens
atgggattgcacttg

SEQ ID NO: 41742 - DNA, 15 bp, Homo sapiens
tgggattgcacttgg

SEQ ID NO: 41743 - DNA, 15 bp, Homo sapiens
gggattgcacttggt

SEQ ID NO: 41744 - DNA, 15 bp, Homo sapiens
ggattgcacttggtc

SEQ ID NO: 41745 - DNA, 15 bp, Homo sapiens
gattgcacttggtct

SEQ ID NO: 41746 - DNA, 15 bp, Homo sapiens
attgcacttggtctc

SEQ ID NO: 41747 - DNA, 15 bp, Homo sapiens
ttgcacttggtctcg

SEQ ID NO: 41748 - DNA, 15 bp, Homo sapiens
tgcacttggtctcgt

SEQ ID NO: 41749 - DNA, 15 bp, Homo sapiens
gcacttggtctcgta

SEQ ID NO: 41750 - DNA, 15 bp, Homo sapiens
cacttggtctcgtag

SEQ ID NO: 41751 - DNA, 15 bp, Homo sapiens
acttggtctcgtaga

SEQ ID NO: 41752 - DNA, 15 bp, Homo sapiens
cttggtctcgtagaa

SEQ ID NO: 41753 - DNA, 15 bp, Homo sapiens
ttggtctcgtagaag

SEQ ID NO: 41754 - DNA, 15 bp, Homo sapiens
tggtctcgtagaagt

SEQ ID NO: 41755 - DNA, 15 bp, Homo sapiens
ggtctcgtagaagta

SEQ ID NO: 41756 - DNA, 15 bp, Homo sapiens
gtctcgtagaagtat

SEQ ID NO: 41757 - DNA, 15 bp, Homo sapiens
tctcgtagaagtatt

SEQ ID NO: 41758 - DNA, 15 bp, Homo sapiens
ctcgtagaagtattg

SEQ ID NO: 41759 - DNA, 15 bp, Homo sapiens
tcgtagaagtattgc

SEQ ID NO: 41760 - DNA, 15 bp, Homo sapiens
cgtagaagtattgct

SEQ ID NO: 41761 - DNA, 15 bp, Homo sapiens
gtagaagtattgctt

SEQ ID NO: 41762 - DNA, 15 bp, Homo sapiens
tagaagtattgcttc

SEQ ID NO: 41763 - DNA, 15 bp, Homo sapiens
agaagtattgcttca

SEQ ID NO: 41764 - DNA, 15 bp, Homo sapiens
gaagtattgcttcag

SEQ ID NO: 41765 - DNA, 15 bp, Homo sapiens
aagtattgcttcagt

SEQ ID NO: 41766 - DNA, 15 bp, Homo sapiens
agtattgcttcagtt

SEQ ID NO: 41767 - DNA, 15 bp, Homo sapiens
gtattgcttcagttg

SEQ ID NO: 41768 - DNA, 15 bp, Homo sapiens
tattgcttcagttgg

SEQ ID NO: 41769 - DNA, 15 bp, Homo sapiens
attgcttcagttggc

SEQ ID NO: 41770 - DNA, 15 bp, Homo sapiens
ttgcttcagttggcc

SEQ ID NO: 41771 - DNA, 15 bp, Homo sapiens
tgcttcagttggcct

SEQ ID NO: 41772 - DNA, 15 bp, Homo sapiens
gcttcagttggcctt

SEQ ID NO: 41773 - DNA, 15 bp, Homo sapiens
cttcagttggccttt

SEQ ID NO: 41774 - DNA, 15 bp, Homo sapiens
ttcagttggcctttt

SEQ ID NO: 41775 - DNA, 15 bp, Homo sapiens
tcagttggccttttg

SEQ ID NO: 41776 - DNA, 15 bp, Homo sapiens
cagttggccttttga

SEQ ID NO: 41777 - DNA, 15 bp, Homo sapiens
agttggccttttgat

SEQ ID NO: 41778 - DNA, 15 bp, Homo sapiens
gttggccttttgata

SEQ ID NO: 41779 - DNA, 15 bp, Homo sapiens
ttggccttttgatac

SEQ ID NO: 41780 - DNA, 15 bp, Homo sapiens
tggccttttgataca

SEQ ID NO: 41781 - DNA, 15 bp, Homo sapiens
ggccttttgatacag

SEQ ID NO: 41782 - DNA, 15 bp, Homo sapiens
gccttttgatacagg

SEQ ID NO: 41783 - DNA, 15 bp, Homo sapiens
ccttttgatacaggg

SEQ ID NO: 41784 - DNA, 15 bp, Homo sapiens
cttttgatacaggga

SEQ ID NO: 41785 - DNA, 15 bp, Homo sapiens
ttttgatacagggac

SEQ ID NO: 41786 - DNA, 15 bp, Homo sapiens
tttgatacagggacc

SEQ ID NO: 41787 - DNA, 15 bp, Homo sapiens
ttgatacagggacct

SEQ ID NO: 41788 - DNA, 15 bp, Homo sapiens
tgatacagggacctt

SEQ ID NO: 41789 - DNA, 15 bp, Homo sapiens
gatacagggaccttt

SEQ ID NO: 41790 - DNA, 15 bp, Homo sapiens
atacagggacctttt

SEQ ID NO: 41791 - DNA, 15 bp, Homo sapiens
tacagggaccttttc

SEQ ID NO: 41792 - DNA, 15 bp, Homo sapiens
acagggaccttttca

SEQ ID NO: 41793 - DNA, 15 bp, Homo sapiens
cagggaccttttcaa

SEQ ID NO: 41794 - DNA, 15 bp, Homo sapiens
agggaccttttcaag

SEQ ID NO: 41795 - DNA, 15 bp, Homo sapiens
gggaccttttcaagg

SEQ ID NO: 41796 - DNA, 15 bp, Homo sapiens
ggaccttttcaagga

SEQ ID NO: 41797 - DNA, 15 bp, Homo sapiens
gaccttttcaaggac

SEQ ID NO: 41798 - DNA, 15 bp, Homo sapiens
accttttcaaggact

SEQ ID NO: 41799 - DNA, 15 bp, Homo sapiens
ccttttcaaggactg

SEQ ID NO: 41800 - DNA, 15 bp, Homo sapiens
cttttcaaggactgt

SEQ ID NO: 41801 - DNA, 15 bp, Homo sapiens
ttttcaaggactgtg

SEQ ID NO: 41802 - DNA, 15 bp, Homo sapiens
tttcaaggactgtga

SEQ ID NO: 41803 - DNA, 15 bp, Homo sapiens
ttcaaggactgtgac

SEQ ID NO: 41804 - DNA, 15 bp, Homo sapiens
tcaaggactgtgacc

SEQ ID NO: 41805 - DNA, 15 bp, Homo sapiens
caaggactgtgaccg

SEQ ID NO: 41806 - DNA, 15 bp, Homo sapiens
aaggactgtgaccgt

SEQ ID NO: 41807 - DNA, 15 bp, Homo sapiens
aggactgtgaccgtc

SEQ ID NO: 41808 - DNA, 15 bp, Homo sapiens
ggactgtgaccgtcc

SEQ ID NO: 41809 - DNA, 15 bp, Homo sapiens
gactgtgaccgtccc

SEQ ID NO: 41810 - DNA, 15 bp, Homo sapiens
actgtgaccgtcccg

SEQ ID NO: 41811 - DNA, 15 bp, Homo sapiens
ctgtgaccgtcccgc

SEQ ID NO: 41812 - DNA, 15 bp, Homo sapiens
tgtgaccgtcccgcc

SEQ ID NO: 41813 - DNA, 15 bp, Homo sapiens
gtgaccgtcccgccc

SEQ ID NO: 41814 - DNA, 15 bp, Homo sapiens
tgaccgtcccgcccg

SEQ ID NO: 41815 - DNA, 15 bp, Homo sapiens
gaccgtcccgcccga

SEQ ID NO: 41816 - DNA, 15 bp, Homo sapiens
accgtcccgcccgac

SEQ ID NO: 41817 - DNA, 15 bp, Homo sapiens
ccgtcccgcccgaca

SEQ ID NO: 41818 - DNA, 15 bp, Homo sapiens
cgtcccgcccgacat

SEQ ID NO: 41819 - DNA, 15 bp, Homo sapiens
gtcccgcccgacatg

SEQ ID NO: 41820 - DNA, 15 bp, Homo sapiens
tcccgcccgacatgt

SEQ ID NO: 41821 - DNA, 15 bp, Homo sapiens
cccgcccgacatgtc

SEQ ID NO: 41822 - DNA, 15 bp, Homo sapiens
ccgcccgacatgtcc

SEQ ID NO: 41823 - DNA, 15 bp, Homo sapiens
cgcccgacatgtcca

SEQ ID NO: 41824 - DNA, 15 bp, Homo sapiens
gcccgacatgtccac

SEQ ID NO: 41825 - DNA, 15 bp, Homo sapiens
cccgacatgtccact

SEQ ID NO: 41826 - DNA, 15 bp, Homo sapiens
ccgacatgtccactg

SEQ ID NO: 41827 - DNA, 15 bp, Homo sapiens
cgacatgtccactgc

SEQ ID NO: 41828 - DNA, 15 bp, Homo sapiens
gacatgtccactgca

SEQ ID NO: 41829 - DNA, 15 bp, Homo sapiens
acatgtccactgcag

SEQ ID NO: 41830 - DNA, 15 bp, Homo sapiens
catgtccactgcagt

SEQ ID NO: 41831 - DNA, 15 bp, Homo sapiens
atgtccactgcagtc

SEQ ID NO: 41832 - DNA, 15 bp, Homo sapiens
tgtccactgcagtct

SEQ ID NO: 41833 - DNA, 15 bp, Homo sapiens
gtccactgcagtctt

SEQ ID NO: 41834 - DNA, 15 bp, Homo sapiens
tccactgcagtcttt

SEQ ID NO: 41835 - DNA, 15 bp, Homo sapiens
ccactgcagtctttt

SEQ ID NO: 41836 - DNA, 15 bp, Homo sapiens
cactgcagtcttttt

SEQ ID NO: 41837 - DNA, 15 bp, Homo sapiens
actgcagtctttttg

SEQ ID NO: 41838 - DNA, 15 bp, Homo sapiens
ctgcagtctttttgt

SEQ ID NO: 41839 - DNA, 15 bp, Homo sapiens
tgcagtctttttgtc

SEQ ID NO: 41840 - DNA, 15 bp, Homo sapiens
gcagtctttttgtct

SEQ ID NO: 41841 - DNA, 15 bp, Homo sapiens
cagtctttttgtctg

SEQ ID NO: 41842 - DNA, 15 bp, Homo sapiens
agtctttttgtctgc

SEQ ID NO: 41843 - DNA, 15 bp, Homo sapiens
gtctttttgtctgct

SEQ ID NO: 41844 - DNA, 15 bp, Homo sapiens
tctttttgtctgctg

SEQ ID NO: 41845 - DNA, 15 bp, Homo sapiens
ctttttgtctgctgc

SEQ ID NO: 41846 - DNA, 15 bp, Homo sapiens
tttttgtctgctgcc

SEQ ID NO: 41847 - DNA, 15 bp, Homo sapiens
ttttgtctgctgccg

SEQ ID NO: 41848 - DNA, 15 bp, Homo sapiens
tttgtctgctgccgt

SEQ ID NO: 41849 - DNA, 15 bp, Homo sapiens
ttgtctgctgccgtt

SEQ ID NO: 41850 - DNA, 15 bp, Homo sapiens
tgtctgctgccgtta

SEQ ID NO: 41851 - DNA, 15 bp, Homo sapiens
gtctgctgccgttac

SEQ ID NO: 41852 - DNA, 15 bp, Homo sapiens
tctgctgccgttacc

SEQ ID NO: 41853 - DNA, 15 bp, Homo sapiens
ctgctgccgttaccc

SEQ ID NO: 41854 - DNA, 15 bp, Homo sapiens
tgctgccgttaccca

SEQ ID NO: 41855 - DNA, 15 bp, Homo sapiens
gctgccgttacccac

SEQ ID NO: 41856 - DNA, 15 bp, Homo sapiens
ctgccgttacccact

SEQ ID NO: 41857 - DNA, 15 bp, Homo sapiens
tgccgttacccactc

SEQ ID NO: 41858 - DNA, 15 bp, Homo sapiens
gccgttacccactca

SEQ ID NO: 41859 - DNA, 15 bp, Homo sapiens
ccgttacccactcac

SEQ ID NO: 41860 - DNA, 15 bp, Homo sapiens
cgttacccactcact

SEQ ID NO: 41861 - DNA, 15 bp, Homo sapiens
gttacccactcacta

SEQ ID NO: 41862 - DNA, 15 bp, Homo sapiens
ttacccactcactaa

SEQ ID NO: 41863 - DNA, 15 bp, Homo sapiens
tacccactcactaat

SEQ ID NO: 41864 - DNA, 15 bp, Homo sapiens
acccactcactaata

SEQ ID NO: 41865 - DNA, 15 bp, Homo sapiens
cccactcactaatac

SEQ ID NO: 41866 - DNA, 15 bp, Homo sapiens
ccactcactaatact

SEQ ID NO: 41867 - DNA, 15 bp, Homo sapiens
cactcactaatactg

SEQ ID NO: 41868 - DNA, 15 bp, Homo sapiens
actcactaatactgt

SEQ ID NO: 41869 - DNA, 15 bp, Homo sapiens
ctcactaatactgtc

SEQ ID NO: 41870 - DNA, 15 bp, Homo sapiens
tcactaatactgtca

SEQ ID NO: 41871 - DNA, 15 bp, Homo sapiens
cactaatactgtcac

SEQ ID NO: 41872 - DNA, 15 bp, Homo sapiens
actaatactgtcaca

SEQ ID NO: 41873 - DNA, 15 bp, Homo sapiens
ctaatactgtcacac

SEQ ID NO: 41874 - DNA, 15 bp, Homo sapiens
taatactgtcacaca

SEQ ID NO: 41875 - DNA, 15 bp, Homo sapiens
aatactgtcacacac

SEQ ID NO: 41876 - DNA, 15 bp, Homo sapiens
atactgtcacacacg

SEQ ID NO: 41877 - DNA, 15 bp, Homo sapiens
tactgtcacacacgc

SEQ ID NO: 41878 - DNA, 15 bp, Homo sapiens
actgtcacacacgct

SEQ ID NO: 41879 - DNA, 15 bp, Homo sapiens
ctgtcacacacgctc

SEQ ID NO: 41880 - DNA, 15 bp, Homo sapiens
tgtcacacacgctca

SEQ ID NO: 41881 - DNA, 15 bp, Homo sapiens
gtcacacacgctcag

SEQ ID NO: 41882 - DNA, 15 bp, Homo sapiens
tcacacacgctcagc

SEQ ID NO: 41883 - DNA, 15 bp, Homo sapiens
cacacacgctcagct

SEQ ID NO: 41884 - DNA, 15 bp, Homo sapiens
acacacgctcagctc

SEQ ID NO: 41885 - DNA, 15 bp, Homo sapiens
cacacgctcagctcc

SEQ ID NO: 41886 - DNA, 15 bp, Homo sapiens
acacgctcagctccc

SEQ ID NO: 41887 - DNA, 15 bp, Homo sapiens
cacgctcagctcccc

SEQ ID NO: 41888 - DNA, 15 bp, Homo sapiens
acgctcagctcccct

SEQ ID NO: 41889 - DNA, 15 bp, Homo sapiens
cgctcagctcccctc

SEQ ID NO: 41890 - DNA, 15 bp, Homo sapiens
gctcagctcccctcg

SEQ ID NO: 41891 - DNA, 15 bp, Homo sapiens
ctcagctcccctcgg

SEQ ID NO: 41892 - DNA, 15 bp, Homo sapiens
tcagctcccctcggc

SEQ ID NO: 41893 - DNA, 15 bp, Homo sapiens
cagctcccctcggcg

SEQ ID NO: 41894 - DNA, 15 bp, Homo sapiens
agctcccctcggcgg

SEQ ID NO: 41895 - DNA, 15 bp, Homo sapiens
gctcccctcggcggg

SEQ ID NO: 41896 - DNA, 15 bp, Homo sapiens
ctcccctcggcgggc

SEQ ID NO: 41897 - DNA, 15 bp, Homo sapiens
tcccctcggcgggca

SEQ ID NO: 41898 - DNA, 15 bp, Homo sapiens
cccctcggcgggcag

SEQ ID NO: 41899 - DNA, 15 bp, Homo sapiens
ccctcggcgggcagg

SEQ ID NO: 41900 - DNA, 15 bp, Homo sapiens
cctcggcgggcaggg

SEQ ID NO: 41901 - DNA, 15 bp, Homo sapiens
ctcggcgggcagggt

SEQ ID NO: 41902 - DNA, 15 bp, Homo sapiens
tcggcgggcagggtc

SEQ ID NO: 41903 - DNA, 15 bp, Homo sapiens
cggcgggcagggtca

SEQ ID NO: 41904 - DNA, 15 bp, Homo sapiens
ggcgggcagggtcag

SEQ ID NO: 41905 - DNA, 15 bp, Homo sapiens
gcgggcagggtcaga

SEQ ID NO: 41906 - DNA, 15 bp, Homo sapiens
cgggcagggtcagag

SEQ ID NO: 41907 - DNA, 15 bp, Homo sapiens
gggcagggtcagagt

SEQ ID NO: 41908 - DNA, 15 bp, Homo sapiens
ggcagggtcagagtg

SEQ ID NO: 41909 - DNA, 15 bp, Homo sapiens
gcagggtcagagtgg

SEQ ID NO: 41910 - DNA, 15 bp, Homo sapiens
cagggtcagagtggc

SEQ ID NO: 41911 - DNA, 15 bp, Homo sapiens
agggtcagagtggcg

SEQ ID NO: 41912 - DNA, 15 bp, Homo sapiens
gggtcagagtggcgc

SEQ ID NO: 41913 - DNA, 15 bp, Homo sapiens
ggtcagagtggcgcc

SEQ ID NO: 41914 - DNA, 15 bp, Homo sapiens
gtcagagtggcgccg

SEQ ID NO: 41915 - DNA, 15 bp, Homo sapiens
tcagagtggcgccgg

SEQ ID NO: 41916 - DNA, 15 bp, Homo sapiens
cagagtggcgccgga

SEQ ID NO: 41917 - DNA, 15 bp, Homo sapiens
agagtggcgccggac

SEQ ID NO: 41918 - DNA, 15 bp, Homo sapiens
gagtggcgccggacc

SEQ ID NO: 41919 - DNA, 15 bp, Homo sapiens
agtggcgccggaccc

SEQ ID NO: 41920 - DNA, 15 bp, Homo sapiens
gtggcgccggaccct

SEQ ID NO: 41921 - DNA, 15 bp, Homo sapiens
tggcgccggaccctc

SEQ ID NO: 41922 - DNA, 15 bp, Homo sapiens
ggcgccggaccctca

SEQ ID NO: 41923 - DNA, 15 bp, Homo sapiens
gcgccggaccctcat

SEQ ID NO: 41924 - DNA, 15 bp, Homo sapiens
cgccggaccctcatg

SEQ ID NO: 41925 - DNA, 15 bp, Homo sapiens
gccggaccctcatgg

SEQ ID NO: 41926 - DNA, 15 bp, Homo sapiens
ccggaccctcatgga

SEQ ID NO: 41927 - DNA, 15 bp, Homo sapiens
cggaccctcatggac

SEQ ID NO: 41928 - DNA, 15 bp, Homo sapiens
ggaccctcatggaca

SEQ ID NO: 41929 - DNA, 15 bp, Homo sapiens
gaccctcatggacat

SEQ ID NO: 41930 - DNA, 15 bp, Homo sapiens
accctcatggacatg

SEQ ID NO: 41931 - DNA, 15 bp, Homo sapiens
ccctcatggacatgt

SEQ ID NO: 41932 - DNA, 15 bp, Homo sapiens
cctcatggacatgtt

SEQ ID NO: 41933 - DNA, 15 bp, Homo sapiens
ctcatggacatgttt

SEQ ID NO: 41934 - DNA, 15 bp, Homo sapiens
tcatggacatgtttg

SEQ ID NO: 41935 - DNA, 15 bp, Homo sapiens
catggacatgtttgc

SEQ ID NO: 41936 - DNA, 15 bp, Homo sapiens
atggacatgtttgca

SEQ ID NO: 41937 - DNA, 15 bp, Homo sapiens
tggacatgtttgcag

SEQ ID NO: 41938 - DNA, 15 bp, Homo sapiens
ggacatgtttgcagc

SEQ ID NO: 41939 - DNA, 15 bp, Homo sapiens
gacatgtttgcagca

SEQ ID NO: 41940 - DNA, 15 bp, Homo sapiens
acatgtttgcagcat

SEQ ID NO: 41941 - DNA, 15 bp, Homo sapiens
catgtttgcagcatc

SEQ ID NO: 41942 - DNA, 15 bp, Homo sapiens
atgtttgcagcatct

SEQ ID NO: 41943 - DNA, 15 bp, Homo sapiens
tgtttgcagcatcta

SEQ ID NO: 41944 - DNA, 15 bp, Homo sapiens
gtttgcagcatctag

SEQ ID NO: 41945 - DNA, 15 bp, Homo sapiens
tttgcagcatctagg

SEQ ID NO: 41946 - DNA, 15 bp, Homo sapiens
ttgcagcatctaggt

SEQ ID NO: 41947 - DNA, 15 bp, Homo sapiens
tgcagcatctaggta

SEQ ID NO: 41948 - DNA, 15 bp, Homo sapiens
gcagcatctaggtaa

SEQ ID NO: 41949 - DNA, 15 bp, Homo sapiens
cagcatctaggtaat

SEQ ID NO: 41950 - DNA, 15 bp, Homo sapiens
agcatctaggtaatt

SEQ ID NO: 41951 - DNA, 15 bp, Homo sapiens
gcatctaggtaattt

SEQ ID NO: 41952 - DNA, 15 bp, Homo sapiens
catctaggtaatttt

SEQ ID NO: 41953 - DNA, 15 bp, Homo sapiens
atctaggtaattttt

SEQ ID NO: 41954 - DNA, 15 bp, Homo sapiens
tctaggtaatttttg

SEQ ID NO: 41955 - DNA, 15 bp, Homo sapiens
ctaggtaatttttgt

SEQ ID NO: 41956 - DNA, 15 bp, Homo sapiens
taggtaatttttgta

SEQ ID NO: 41957 - DNA, 15 bp, Homo sapiens
aggtaatttttgtat

SEQ ID NO: 41958 - DNA, 15 bp, Homo sapiens
ggtaatttttgtatt

SEQ ID NO: 41959 - DNA, 15 bp, Homo sapiens
gtaatttttgtattc

SEQ ID NO: 41960 - DNA, 15 bp, Homo sapiens
taatttttgtattcc

SEQ ID NO: 41961 - DNA, 15 bp, Homo sapiens
aatttttgtattcct

SEQ ID NO: 41962 - DNA, 15 bp, Homo sapiens
atttttgtattcctc

SEQ ID NO: 41963 - DNA, 15 bp, Homo sapiens
tttttgtattcctcc

SEQ ID NO: 41964 - DNA, 15 bp, Homo sapiens
ttttgtattcctcca

SEQ ID NO: 41965 - DNA, 15 bp, Homo sapiens
tttgtattcctccag

SEQ ID NO: 41966 - DNA, 15 bp, Homo sapiens
ttgtattcctccagc

SEQ ID NO: 41967 - DNA, 15 bp, Homo sapiens
tgtattcctccagca

SEQ ID NO: 41968 - DNA, 15 bp, Homo sapiens
gtattcctccagcag

SEQ ID NO: 41969 - DNA, 15 bp, Homo sapiens
tattcctccagcaga

SEQ ID NO: 41970 - DNA, 15 bp, Homo sapiens
attcctccagcagaa

SEQ ID NO: 41971 - DNA, 15 bp, Homo sapiens
ttcctccagcagaaa

SEQ ID NO: 41972 - DNA, 15 bp, Homo sapiens
tcctccagcagaaag

SEQ ID NO: 41973 - DNA, 15 bp, Homo sapiens
cctccagcagaaaga

SEQ ID NO: 41974 - DNA, 15 bp, Homo sapiens
ctccagcagaaagag

SEQ ID NO: 41975 - DNA, 15 bp, Homo sapiens
tccagcagaaagaga

SEQ ID NO: 41976 - DNA, 15 bp, Homo sapiens
ccagcagaaagagaa

SEQ ID NO: 41977 - DNA, 15 bp, Homo sapiens
cagcagaaagagaag

SEQ ID NO: 41978 - DNA, 15 bp, Homo sapiens
agcagaaagagaaga

SEQ ID NO: 41979 - DNA, 15 bp, Homo sapiens
gcagaaagagaagag

SEQ ID NO: 41980 - DNA, 15 bp, Homo sapiens
cagaaagagaagagg

SEQ ID NO: 41981 - DNA, 15 bp, Homo sapiens
agaaagagaagagga

SEQ ID NO: 41982 - DNA, 15 bp, Homo sapiens
gaaagagaagaggag

SEQ ID NO: 41983 - DNA, 15 bp, Homo sapiens
aaagagaagaggagg

SEQ ID NO: 41984 - DNA, 15 bp, Homo sapiens
aagagaagaggaggc

SEQ ID NO: 41985 - DNA, 15 bp, Homo sapiens
agagaagaggaggct

SEQ ID NO: 41986 - DNA, 15 bp, Homo sapiens
gagaagaggaggctc

SEQ ID NO: 41987 - DNA, 15 bp, Homo sapiens
agaagaggaggctcc

SEQ ID NO: 41988 - DNA, 15 bp, Homo sapiens
gaagaggaggctcca

SEQ ID NO: 41989 - DNA, 15 bp, Homo sapiens
aagaggaggctccaa

SEQ ID NO: 41990 - DNA, 15 bp, Homo sapiens
agaggaggctccaaa

SEQ ID NO: 41991 - DNA, 15 bp, Homo sapiens
gaggaggctccaaag

SEQ ID NO: 41992 - DNA, 15 bp, Homo sapiens
aggaggctccaaagg

SEQ ID NO: 41993 - DNA, 15 bp, Homo sapiens
ggaggctccaaaggc

SEQ ID NO: 41994 - DNA, 15 bp, Homo sapiens
gaggctccaaaggca

SEQ ID NO: 41995 - DNA, 15 bp, Homo sapiens
aggctccaaaggcac

SEQ ID NO: 41996 - DNA, 15 bp, Homo sapiens
ggctccaaaggcact

SEQ ID NO: 41997 - DNA, 15 bp, Homo sapiens
gctccaaaggcactt

SEQ ID NO: 41998 - DNA, 15 bp, Homo sapiens
ctccaaaggcacttg

SEQ ID NO: 41999 - DNA, 15 bp, Homo sapiens
tccaaaggcacttga

SEQ ID NO: 42000 - DNA, 15 bp, Homo sapiens
ccaaaggcacttgac

SEQ ID NO: 42001 - DNA, 15 bp, Homo sapiens
caaaggcacttgact

SEQ ID NO: 42002 - DNA, 15 bp, Homo sapiens
aaaggcacttgacta

SEQ ID NO: 42003 - DNA, 15 bp, Homo sapiens
aaggcacttgactac

SEQ ID NO: 42004 - DNA, 15 bp, Homo sapiens
aggcacttgactact

SEQ ID NO: 42005 - DNA, 15 bp, Homo sapiens
ggcacttgactactg

SEQ ID NO: 42006 - DNA, 15 bp, Homo sapiens
gcacttgactactga

SEQ ID NO: 42007 - DNA, 15 bp, Homo sapiens
cacttgactactgag

SEQ ID NO: 42008 - DNA, 15 bp, Homo sapiens
acttgactactgagc

SEQ ID NO: 42009 - DNA, 15 bp, Homo sapiens
cttgactactgagca

SEQ ID NO: 42010 - DNA, 15 bp, Homo sapiens
ttgactactgagcat

SEQ ID NO: 42011 - DNA, 15 bp, Homo sapiens
tgactactgagcatc

SEQ ID NO: 42012 - DNA, 15 bp, Homo sapiens
gactactgagcatca

SEQ ID NO: 42013 - DNA, 15 bp, Homo sapiens
actactgagcatcac

SEQ ID NO: 42014 - DNA, 15 bp, Homo sapiens
ctactgagcatcacc

SEQ ID NO: 42015 - DNA, 15 bp, Homo sapiens
tactgagcatcaccc

SEQ ID NO: 42016 - DNA, 15 bp, Homo sapiens
actgagcatcaccct

SEQ ID NO: 42017 - DNA, 15 bp, Homo sapiens
ctgagcatcaccctg

SEQ ID NO: 42018 - DNA, 15 bp, Homo sapiens
tgagcatcaccctgg

SEQ ID NO: 42019 - DNA, 15 bp, Homo sapiens
gagcatcaccctgga

SEQ ID NO: 42020 - DNA, 15 bp, Homo sapiens
agcatcaccctggac

SEQ ID NO: 42021 - DNA, 15 bp, Homo sapiens
gcatcaccctggacg

SEQ ID NO: 42022 - DNA, 15 bp, Homo sapiens
catcaccctggacgt

SEQ ID NO: 42023 - DNA, 15 bp, Homo sapiens
atcaccctggacgtg

SEQ ID NO: 42024 - DNA, 15 bp, Homo sapiens
tcaccctggacgtgt

SEQ ID NO: 42025 - DNA, 15 bp, Homo sapiens
caccctggacgtgta

SEQ ID NO: 42026 - DNA, 15 bp, Homo sapiens
accctggacgtgtac

SEQ ID NO: 42027 - DNA, 15 bp, Homo sapiens
ccctggacgtgtaca

SEQ ID NO: 42028 - DNA, 15 bp, Homo sapiens
cctggacgtgtacaa

SEQ ID NO: 42029 - DNA, 15 bp, Homo sapiens
ctggacgtgtacaag

SEQ ID NO: 42030 - DNA, 15 bp, Homo sapiens
tggacgtgtacaagt

SEQ ID NO: 42031 - DNA, 15 bp, Homo sapiens
ggacgtgtacaagtc

SEQ ID NO: 42032 - DNA, 15 bp, Homo sapiens
gacgtgtacaagtct

SEQ ID NO: 42033 - DNA, 15 bp, Homo sapiens
acgtgtacaagtctg

SEQ ID NO: 42034 - DNA, 15 bp, Homo sapiens
cgtgtacaagtctgc

SEQ ID NO: 42035 - DNA, 15 bp, Homo sapiens
gtgtacaagtctgcg

SEQ ID NO: 42036 - DNA, 15 bp, Homo sapiens
tgtacaagtctgcgt

SEQ ID NO: 42037 - DNA, 15 bp, Homo sapiens
gtacaagtctgcgtc

SEQ ID NO: 42038 - DNA, 15 bp, Homo sapiens
tacaagtctgcgtcc

SEQ ID NO: 42039 - DNA, 15 bp, Homo sapiens
acaagtctgcgtcct

SEQ ID NO: 42040 - DNA, 15 bp, Homo sapiens
caagtctgcgtcctt

SEQ ID NO: 42041 - DNA, 15 bp, Homo sapiens
aagtctgcgtcctta

SEQ ID NO: 42042 - DNA, 15 bp, Homo sapiens
agtctgcgtccttat

SEQ ID NO: 42043 - DNA, 15 bp, Homo sapiens
gtctgcgtccttatt

SEQ ID NO: 42044 - DNA, 15 bp, Homo sapiens
tctgcgtccttattg

SEQ ID NO: 42045 - DNA, 15 bp, Homo sapiens
ctgcgtccttattgt

SEQ ID NO: 42046 - DNA, 15 bp, Homo sapiens
tgcgtccttattgtt

SEQ ID NO: 42047 - DNA, 15 bp, Homo sapiens
gcgtccttattgttt

SEQ ID NO: 42048 - DNA, 15 bp, Homo sapiens
cgtccttattgtttt

SEQ ID NO: 42049 - DNA, 15 bp, Homo sapiens
gtccttattgttttc

SEQ ID NO: 42050 - DNA, 15 bp, Homo sapiens
tccttattgttttct

SEQ ID NO: 42051 - DNA, 15 bp, Homo sapiens
ccttattgttttctt

SEQ ID NO: 42052 - DNA, 15 bp, Homo sapiens
cttattgttttcttc

SEQ ID NO: 42053 - DNA, 15 bp, Homo sapiens
ttattgttttcttca

SEQ ID NO: 42054 - DNA, 15 bp, Homo sapiens
tattgttttcttcat

SEQ ID NO: 42055 - DNA, 15 bp, Homo sapiens
attgttttcttcatt

SEQ ID NO: 42056 - DNA, 15 bp, Homo sapiens
ttgttttcttcattg

SEQ ID NO: 42057 - DNA, 15 bp, Homo sapiens
tgttttcttcattgg

SEQ ID NO: 42058 - DNA, 15 bp, Homo sapiens
gttttcttcattggg

SEQ ID NO: 42059 - DNA, 15 bp, Homo sapiens
ttttcttcattgggc

SEQ ID NO: 42060 - DNA, 15 bp, Homo sapiens
tttcttcattgggcc

SEQ ID NO: 42061 - DNA, 15 bp, Homo sapiens
ttcttcattgggccg

SEQ ID NO: 42062 - DNA, 15 bp, Homo sapiens
tcttcattgggccga

SEQ ID NO: 42063 - DNA, 15 bp, Homo sapiens
cttcattgggccgaa

SEQ ID NO: 42064 - DNA, 15 bp, Homo sapiens
ttcattgggccgaac

SEQ ID NO: 42065 - DNA, 15 bp, Homo sapiens
tcattgggccgaact

SEQ ID NO: 42066 - DNA, 15 bp, Homo sapiens
cattgggccgaactt

SEQ ID NO: 42067 - DNA, 15 bp, Homo sapiens
attgggccgaacttt

SEQ ID NO: 42068 - DNA, 15 bp, Homo sapiens
ttgggccgaactttc

SEQ ID NO: 42069 - DNA, 15 bp, Homo sapiens
tgggccgaactttct

SEQ ID NO: 42070 - DNA, 15 bp, Homo sapiens
gggccgaactttctg

SEQ ID NO: 42071 - DNA, 15 bp, Homo sapiens
ggccgaactttctgg

SEQ ID NO: 42072 - DNA, 15 bp, Homo sapiens
gccgaactttctggt

SEQ ID NO: 42073 - DNA, 15 bp, Homo sapiens
ccgaactttctggtc

SEQ ID NO: 42074 - DNA, 15 bp, Homo sapiens
cgaactttctggtcc

SEQ ID NO: 42075 - DNA, 15 bp, Homo sapiens
gaactttctggtcct

SEQ ID NO: 42076 - DNA, 15 bp, Homo sapiens
aactttctggtcctc

SEQ ID NO: 42077 - DNA, 15 bp, Homo sapiens
actttctggtcctca

SEQ ID NO: 42078 - DNA, 15 bp, Homo sapiens
ctttctggtcctcat

SEQ ID NO: 42079 - DNA, 15 bp, Homo sapiens
tttctggtcctcatc

SEQ ID NO: 42080 - DNA, 15 bp, Homo sapiens
ttctggtcctcatcc

SEQ ID NO: 42081 - DNA, 15 bp, Homo sapiens
tctggtcctcatcca

SEQ ID NO: 42082 - DNA, 15 bp, Homo sapiens
ctggtcctcatccaa

SEQ ID NO: 42083 - DNA, 15 bp, Homo sapiens
tggtcctcatccaac

SEQ ID NO: 42084 - DNA, 15 bp, Homo sapiens
ggtcctcatccaaca

SEQ ID NO: 42085 - DNA, 15 bp, Homo sapiens
gtcctcatccaacag

SEQ ID NO: 42086 - DNA, 15 bp, Homo sapiens
tcctcatccaacagc

SEQ ID NO: 42087 - DNA, 15 bp, Homo sapiens
cctcatccaacagct

SEQ ID NO: 42088 - DNA, 15 bp, Homo sapiens
ctcatccaacagctc

SEQ ID NO: 42089 - DNA, 15 bp, Homo sapiens
tcatccaacagctct

SEQ ID NO: 42090 - DNA, 15 bp, Homo sapiens
catccaacagctctt

SEQ ID NO: 42091 - DNA, 15 bp, Homo sapiens
atccaacagctcttc

SEQ ID NO: 42092 - DNA, 15 bp, Homo sapiens
tccaacagctcttct

SEQ ID NO: 42093 - DNA, 15 bp, Homo sapiens
ccaacagctcttcta

SEQ ID NO: 42094 - DNA, 15 bp, Homo sapiens
caacagctcttctat

SEQ ID NO: 42095 - DNA, 15 bp, Homo sapiens
aacagctcttctatc

SEQ ID NO: 42096 - DNA, 15 bp, Homo sapiens
acagctcttctatca

SEQ ID NO: 42097 - DNA, 15 bp, Homo sapiens
cagctcttctatcac

SEQ ID NO: 42098 - DNA, 15 bp, Homo sapiens
agctcttctatcacg

SEQ ID NO: 42099 - DNA, 15 bp, Homo sapiens
gctcttctatcacgt

SEQ ID NO: 42100 - DNA, 15 bp, Homo sapiens
ctcttctatcacgtg

SEQ ID NO: 42101 - DNA, 15 bp, Homo sapiens
tcttctatcacgtgt

SEQ ID NO: 42102 - DNA, 15 bp, Homo sapiens
cttctatcacgtgtt

SEQ ID NO: 42103 - DNA, 15 bp, Homo sapiens
ttctatcacgtgttc

SEQ ID NO: 42104 - DNA, 15 bp, Homo sapiens
tctatcacgtgttcg

SEQ ID NO: 42105 - DNA, 15 bp, Homo sapiens
ctatcacgtgttcga

SEQ ID NO: 42106 - DNA, 15 bp, Homo sapiens
tatcacgtgttcgaa

SEQ ID NO: 42107 - DNA, 15 bp, Homo sapiens
atcacgtgttcgaaa

SEQ ID NO: 42108 - DNA, 15 bp, Homo sapiens
tcacgtgttcgaaag

SEQ ID NO: 42109 - DNA, 15 bp, Homo sapiens
cacgtgttcgaaagt

SEQ ID NO: 42110 - DNA, 15 bp, Homo sapiens
acgtgttcgaaagtg

SEQ ID NO: 42111 - DNA, 15 bp, Homo sapiens
cgtgttcgaaagtgt

SEQ ID NO: 42112 - DNA, 15 bp, Homo sapiens
gtgttcgaaagtgtc

SEQ ID NO: 42113 - DNA, 15 bp, Homo sapiens
tgttcgaaagtgtca

SEQ ID NO: 42114 - DNA, 15 bp, Homo sapiens
gttcgaaagtgtcag

SEQ ID NO: 42115 - DNA, 15 bp, Homo sapiens
ttcgaaagtgtcagc

SEQ ID NO: 42116 - DNA, 15 bp, Homo sapiens
tcgaaagtgtcagcc

SEQ ID NO: 42117 - DNA, 15 bp, Homo sapiens
cgaaagtgtcagcca

SEQ ID NO: 42118 - DNA, 15 bp, Homo sapiens
gaaagtgtcagccaa

SEQ ID NO: 42119 - DNA, 15 bp, Homo sapiens
aaagtgtcagccaat

SEQ ID NO: 42120 - DNA, 15 bp, Homo sapiens
aagtgtcagccaatg

SEQ ID NO: 42121 - DNA, 15 bp, Homo sapiens
agtgtcagccaatga

SEQ ID NO: 42122 - DNA, 15 bp, Homo sapiens
gtgtcagccaatgat

SEQ ID NO: 42123 - DNA, 15 bp, Homo sapiens
tgtcagccaatgatg

SEQ ID NO: 42124 - DNA, 15 bp, Homo sapiens
gtcagccaatgatgt

SEQ ID NO: 42125 - DNA, 15 bp, Homo sapiens
tcagccaatgatgtc

SEQ ID NO: 42126 - DNA, 15 bp, Homo sapiens
cagccaatgatgtca

SEQ ID NO: 42127 - DNA, 15 bp, Homo sapiens
agccaatgatgtcaa

SEQ ID NO: 42128 - DNA, 15 bp, Homo sapiens
gccaatgatgtcaag

SEQ ID NO: 42129 - DNA, 15 bp, Homo sapiens
ccaatgatgtcaagc

SEQ ID NO: 42130 - DNA, 15 bp, Homo sapiens
caatgatgtcaagcc

SEQ ID NO: 42131 - DNA, 15 bp, Homo sapiens
aatgatgtcaagcct

SEQ ID NO: 42132 - DNA, 15 bp, Homo sapiens
atgatgtcaagcctc

SEQ ID NO: 42133 - DNA, 15 bp, Homo sapiens
tgatgtcaagcctct

SEQ ID NO: 42134 - DNA, 15 bp, Homo sapiens
gatgtcaagcctctt

SEQ ID NO: 42135 - DNA, 15 bp, Homo sapiens
atgtcaagcctcttg

SEQ ID NO: 42136 - DNA, 15 bp, Homo sapiens
tgtcaagcctcttga

SEQ ID NO: 42137 - DNA, 15 bp, Homo sapiens
gtcaagcctcttgaa

SEQ ID NO: 42138 - DNA, 15 bp, Homo sapiens
tcaagcctcttgaac

SEQ ID NO: 42139 - DNA, 15 bp, Homo sapiens
caagcctcttgaacc

SEQ ID NO: 42140 - DNA, 15 bp, Homo sapiens
aagcctcttgaacct

SEQ ID NO: 42141 - DNA, 15 bp, Homo sapiens
agcctcttgaacctg

SEQ ID NO: 42142 - DNA, 15 bp, Homo sapiens
gcctcttgaacctgc

SEQ ID NO: 42143 - DNA, 15 bp, Homo sapiens
cctcttgaacctgcc

SEQ ID NO: 42144 - DNA, 15 bp, Homo sapiens
ctcttgaacctgcct

SEQ ID NO: 42145 - DNA, 15 bp, Homo sapiens
tcttgaacctgcctt

SEQ ID NO: 42146 - DNA, 15 bp, Homo sapiens
cttgaacctgccttg

SEQ ID NO: 42147 - DNA, 15 bp, Homo sapiens
ttgaacctgccttgg

SEQ ID NO: 42148 - DNA, 15 bp, Homo sapiens
tgaacctgccttggg

SEQ ID NO: 42149 - DNA, 15 bp, Homo sapiens
gaacctgccttgggc

SEQ ID NO: 42150 - DNA, 15 bp, Homo sapiens
aacctgccttgggcc

SEQ ID NO: 42151 - DNA, 15 bp, Homo sapiens
acctgccttgggccc

SEQ ID NO: 42152 - DNA, 15 bp, Homo sapiens
cctgccttgggccca

SEQ ID NO: 42153 - DNA, 15 bp, Homo sapiens
ctgccttgggcccat

SEQ ID NO: 42154 - DNA, 15 bp, Homo sapiens
tgccttgggcccatt

SEQ ID NO: 42155 - DNA, 15 bp, Homo sapiens
gccttgggcccattc

SEQ ID NO: 42156 - DNA, 15 bp, Homo sapiens
ccttgggcccattca

SEQ ID NO: 42157 - DNA, 15 bp, Homo sapiens
cttgggcccattcac

SEQ ID NO: 42158 - DNA, 15 bp, Homo sapiens
ttgggcccattcacg

SEQ ID NO: 42159 - DNA, 15 bp, Homo sapiens
tgggcccattcacgc

SEQ ID NO: 42160 - DNA, 15 bp, Homo sapiens
gggcccattcacgct

SEQ ID NO: 42161 - DNA, 15 bp, Homo sapiens
ggcccattcacgctc

SEQ ID NO: 42162 - DNA, 15 bp, Homo sapiens
gcccattcacgctct

SEQ ID NO: 42163 - DNA, 15 bp, Homo sapiens
cccattcacgctctc

SEQ ID NO: 42164 - DNA, 15 bp, Homo sapiens
ccattcacgctctcc

SEQ ID NO: 42165 - DNA, 15 bp, Homo sapiens
cattcacgctctcca

SEQ ID NO: 42166 - DNA, 15 bp, Homo sapiens
attcacgctctccag

SEQ ID NO: 42167 - DNA, 15 bp, Homo sapiens
ttcacgctctccaga

SEQ ID NO: 42168 - DNA, 15 bp, Homo sapiens
tcacgctctccagag

SEQ ID NO: 42169 - DNA, 15 bp, Homo sapiens
cacgctctccagagt

SEQ ID NO: 42170 - DNA, 15 bp, Homo sapiens
acgctctccagagtc

SEQ ID NO: 42171 - DNA, 15 bp, Homo sapiens
cgctctccagagtcc

SEQ ID NO: 42172 - DNA, 15 bp, Homo sapiens
gctctccagagtccc

SEQ ID NO: 42173 - DNA, 15 bp, Homo sapiens
ctctccagagtccca

SEQ ID NO: 42174 - DNA, 15 bp, Homo sapiens
tctccagagtcccat

SEQ ID NO: 42175 - DNA, 15 bp, Homo sapiens
ctccagagtcccatg

SEQ ID NO: 42176 - DNA, 15 bp, Homo sapiens
tccagagtcccatgg

SEQ ID NO: 42177 - DNA, 15 bp, Homo sapiens
ccagagtcccatggg

SEQ ID NO: 42178 - DNA, 15 bp, Homo sapiens
cagagtcccatgggt

SEQ ID NO: 42179 - DNA, 15 bp, Homo sapiens
agagtcccatgggtc

SEQ ID NO: 42180 - DNA, 15 bp, Homo sapiens
gagtcccatgggtcc

SEQ ID NO: 42181 - DNA, 15 bp, Homo sapiens
agtcccatgggtccg

SEQ ID NO: 42182 - DNA, 15 bp, Homo sapiens
gtcccatgggtccgc

SEQ ID NO: 42183 - DNA, 15 bp, Homo sapiens
tcccatgggtccgca

SEQ ID NO: 42184 - DNA, 15 bp, Homo sapiens
cccatgggtccgcac

SEQ ID NO: 42185 - DNA, 15 bp, Homo sapiens
ccatgggtccgcaca

SEQ ID NO: 42186 - DNA, 15 bp, Homo sapiens
catgggtccgcacac

SEQ ID NO: 42187 - DNA, 15 bp, Homo sapiens
atgggtccgcacacc

SEQ ID NO: 42188 - DNA, 15 bp, Homo sapiens
tgggtccgcacacct

SEQ ID NO: 42189 - DNA, 15 bp, Homo sapiens
gggtccgcacacctg

SEQ ID NO: 42190 - DNA, 15 bp, Homo sapiens
ggtccgcacacctgg

SEQ ID NO: 42191 - DNA, 15 bp, Homo sapiens
gtccgcacacctggg

SEQ ID NO: 42192 - DNA, 15 bp, Homo sapiens
tccgcacacctgggt

SEQ ID NO: 42193 - DNA, 15 bp, Homo sapiens
ccgcacacctgggta

SEQ ID NO: 42194 - DNA, 15 bp, Homo sapiens
cgcacacctgggtag

SEQ ID NO: 42195 - DNA, 15 bp, Homo sapiens
gcacacctgggtagg

SEQ ID NO: 42196 - DNA, 15 bp, Homo sapiens
cacacctgggtaggc

SEQ ID NO: 42197 - DNA, 15 bp, Homo sapiens
acacctgggtaggcc

SEQ ID NO: 42198 - DNA, 15 bp, Homo sapiens
cacctgggtaggcca

SEQ ID NO: 42199 - DNA, 15 bp, Homo sapiens
acctgggtaggccaa

SEQ ID NO: 42200 - DNA, 15 bp, Homo sapiens
cctgggtaggccaag

SEQ ID NO: 42201 - DNA, 15 bp, Homo sapiens
ctgggtaggccaagc

SEQ ID NO: 42202 - DNA, 15 bp, Homo sapiens
tgggtaggccaagcc

SEQ ID NO: 42203 - DNA, 15 bp, Homo sapiens
gggtaggccaagcca

SEQ ID NO: 42204 - DNA, 15 bp, Homo sapiens
ggtaggccaagccac

SEQ ID NO: 42205 - DNA, 15 bp, Homo sapiens
gtaggccaagccacc

SEQ ID NO: 42206 - DNA, 15 bp, Homo sapiens
taggccaagccacct

SEQ ID NO: 42207 - DNA, 15 bp, Homo sapiens
aggccaagccacctt

SEQ ID NO: 42208 - DNA, 15 bp, Homo sapiens
ggccaagccaccttg

SEQ ID NO: 42209 - DNA, 15 bp, Homo sapiens
gccaagccaccttgt

SEQ ID NO: 42210 - DNA, 15 bp, Homo sapiens
ccaagccaccttgtc

SEQ ID NO: 42211 - DNA, 15 bp, Homo sapiens
caagccaccttgtcc

SEQ ID NO: 42212 - DNA, 15 bp, Homo sapiens
aagccaccttgtcct

SEQ ID NO: 42213 - DNA, 15 bp, Homo sapiens
agccaccttgtcctc

SEQ ID NO: 42214 - DNA, 15 bp, Homo sapiens
gccaccttgtcctcg

SEQ ID NO: 42215 - DNA, 15 bp, Homo sapiens
ccaccttgtcctcgg

SEQ ID NO: 42216 - DNA, 15 bp, Homo sapiens
caccttgtcctcgga

SEQ ID NO: 42217 - DNA, 15 bp, Homo sapiens
accttgtcctcggat

SEQ ID NO: 42218 - DNA, 15 bp, Homo sapiens
ccttgtcctcggatg

SEQ ID NO: 42219 - DNA, 15 bp, Homo sapiens
cttgtcctcggatgt

SEQ ID NO: 42220 - DNA, 15 bp, Homo sapiens
ttgtcctcggatgtt

SEQ ID NO: 42221 - DNA, 15 bp, Homo sapiens
tgtcctcggatgttt

SEQ ID NO: 42222 - DNA, 15 bp, Homo sapiens
gtcctcggatgtttg

SEQ ID NO: 42223 - DNA, 15 bp, Homo sapiens
tcctcggatgtttgc

SEQ ID NO: 42224 - DNA, 15 bp, Homo sapiens
cctcggatgtttgct

SEQ ID NO: 42225 - DNA, 15 bp, Homo sapiens
ctcggatgtttgctt

SEQ ID NO: 42226 - DNA, 15 bp, Homo sapiens
tcggatgtttgcttc

SEQ ID NO: 42227 - DNA, 15 bp, Homo sapiens
cggatgtttgcttct

SEQ ID NO: 42228 - DNA, 15 bp, Homo sapiens
ggatgtttgcttctt

SEQ ID NO: 42229 - DNA, 15 bp, Homo sapiens
gatgtttgcttcttt

SEQ ID NO: 42230 - DNA, 15 bp, Homo sapiens
atgtttgcttctttc

SEQ ID NO: 42231 - DNA, 15 bp, Homo sapiens
tgtttgcttctttca

SEQ ID NO: 42232 - DNA, 15 bp, Homo sapiens
gtttgcttctttcat

SEQ ID NO: 42233 - DNA, 15 bp, Homo sapiens
tttgcttctttcatg

SEQ ID NO: 42234 - DNA, 15 bp, Homo sapiens
ttgcttctttcatgg

SEQ ID NO: 42235 - DNA, 15 bp, Homo sapiens
tgcttctttcatggg

SEQ ID NO: 42236 - DNA, 15 bp, Homo sapiens
gcttctttcatgggg

SEQ ID NO: 42237 - DNA, 15 bp, Homo sapiens
cttctttcatggggg

SEQ ID NO: 42238 - DNA, 15 bp, Homo sapiens
ttctttcatgggggc

SEQ ID NO: 42239 - DNA, 15 bp, Homo sapiens
tctttcatgggggca

SEQ ID NO: 42240 - DNA, 15 bp, Homo sapiens
ctttcatgggggcag

SEQ ID NO: 42241 - DNA, 15 bp, Homo sapiens
tttcatgggggcagc

SEQ ID NO: 42242 - DNA, 15 bp, Homo sapiens
ttcatgggggcagcc

SEQ ID NO: 42243 - DNA, 15 bp, Homo sapiens
tcatgggggcagcct

SEQ ID NO: 42244 - DNA, 15 bp, Homo sapiens
catgggggcagcctt

SEQ ID NO: 42245 - DNA, 15 bp, Homo sapiens
atgggggcagccttc

SEQ ID NO: 42246 - DNA, 15 bp, Homo sapiens
tgggggcagccttca

SEQ ID NO: 42247 - DNA, 15 bp, Homo sapiens
gggggcagccttcat

SEQ ID NO: 42248 - DNA, 15 bp, Homo sapiens
ggggcagccttcatg

SEQ ID NO: 42249 - DNA, 15 bp, Homo sapiens
gggcagccttcatgc

SEQ ID NO: 42250 - DNA, 15 bp, Homo sapiens
ggcagccttcatgca

SEQ ID NO: 42251 - DNA, 15 bp, Homo sapiens
gcagccttcatgcaa

SEQ ID NO: 42252 - DNA, 15 bp, Homo sapiens
cagccttcatgcaac

SEQ ID NO: 42253 - DNA, 15 bp, Homo sapiens
agccttcatgcaacc

SEQ ID NO: 42254 - DNA, 15 bp, Homo sapiens
gccttcatgcaacca

SEQ ID NO: 42255 - DNA, 15 bp, Homo sapiens
ccttcatgcaaccaa

SEQ ID NO: 42256 - DNA, 15 bp, Homo sapiens
cttcatgcaaccaaa

SEQ ID NO: 42257 - DNA, 15 bp, Homo sapiens
ttcatgcaaccaaag

SEQ ID NO: 42258 - DNA, 15 bp, Homo sapiens
tcatgcaaccaaagt

SEQ ID NO: 42259 - DNA, 15 bp, Homo sapiens
catgcaaccaaagta

SEQ ID NO: 42260 - DNA, 15 bp, Homo sapiens
atgcaaccaaagtat

SEQ ID NO: 42261 - DNA, 15 bp, Homo sapiens
tgcaaccaaagtatg

SEQ ID NO: 42262 - DNA, 15 bp, Homo sapiens
gcaaccaaagtatga

SEQ ID NO: 42263 - DNA, 15 bp, Homo sapiens
caaccaaagtatgaa

SEQ ID NO: 42264 - DNA, 15 bp, Homo sapiens
aaccaaagtatgaaa

SEQ ID NO: 42265 - DNA, 15 bp, Homo sapiens
accaaagtatgaaat

SEQ ID NO: 42266 - DNA, 15 bp, Homo sapiens
ccaaagtatgaaata

SEQ ID NO: 42267 - DNA, 15 bp, Homo sapiens
caaagtatgaaataa

SEQ ID NO: 42268 - DNA, 15 bp, Homo sapiens
aaagtatgaaataac

SEQ ID NO: 42269 - DNA, 15 bp, Homo sapiens
aagtatgaaataacc

SEQ ID NO: 42270 - DNA, 15 bp, Homo sapiens
agtatgaaataacca

SEQ ID NO: 42271 - DNA, 15 bp, Homo sapiens
gtatgaaataaccat

SEQ ID NO: 42272 - DNA, 15 bp, Homo sapiens
tatgaaataaccata

SEQ ID NO: 42273 - DNA, 15 bp, Homo sapiens
atgaaataaccatag

SEQ ID NO: 42274 - DNA, 15 bp, Homo sapiens
tgaaataaccatagt

SEQ ID NO: 42275 - DNA, 15 bp, Homo sapiens
gaaataaccatagta

SEQ ID NO: 42276 - DNA, 15 bp, Homo sapiens
aaataaccatagtaa

SEQ ID NO: 42277 - DNA, 15 bp, Homo sapiens
aataaccatagtaag

SEQ ID NO: 42278 - DNA, 15 bp, Homo sapiens
ataaccatagtaagg

SEQ ID NO: 42279 - DNA, 15 bp, Homo sapiens
taaccatagtaagga

SEQ ID NO: 42280 - DNA, 15 bp, Homo sapiens
aaccatagtaaggaa

SEQ ID NO: 42281 - DNA, 15 bp, Homo sapiens
accatagtaaggaaa

SEQ ID NO: 42282 - DNA, 15 bp, Homo sapiens
ccatagtaaggaaaa

SEQ ID NO: 42283 - DNA, 15 bp, Homo sapiens
catagtaaggaaaag

SEQ ID NO: 42284 - DNA, 15 bp, Homo sapiens
atagtaaggaaaagg

SEQ ID NO: 42285 - DNA, 15 bp, Homo sapiens
tagtaaggaaaagga

SEQ ID NO: 42286 - DNA, 15 bp, Homo sapiens
agtaaggaaaaggat

SEQ ID NO: 42287 - DNA, 15 bp, Homo sapiens
gtaaggaaaaggatg

SEQ ID NO: 42288 - DNA, 15 bp, Homo sapiens
taaggaaaaggatgg

SEQ ID NO: 42289 - DNA, 15 bp, Homo sapiens
aaggaaaaggatggt

SEQ ID NO: 42290 - DNA, 15 bp, Homo sapiens
aggaaaaggatggtc

SEQ ID NO: 42291 - DNA, 15 bp, Homo sapiens
ggaaaaggatggtca

SEQ ID NO: 42292 - DNA, 15 bp, Homo sapiens
gaaaaggatggtcat

SEQ ID NO: 42293 - DNA, 15 bp, Homo sapiens
aaaaggatggtcatc

SEQ ID NO: 42294 - DNA, 15 bp, Homo sapiens
aaaggatggtcatca

SEQ ID NO: 42295 - DNA, 15 bp, Homo sapiens
aaggatggtcatcac

SEQ ID NO: 42296 - DNA, 15 bp, Homo sapiens
aggatggtcatcact

SEQ ID NO: 42297 - DNA, 15 bp, Homo sapiens
ggatggtcatcactc

SEQ ID NO: 42298 - DNA, 15 bp, Homo sapiens
gatggtcatcactct

SEQ ID NO: 42299 - DNA, 15 bp, Homo sapiens
atggtcatcactctt

SEQ ID NO: 42300 - DNA, 15 bp, Homo sapiens
tggtcatcactcttc

SEQ ID NO: 42301 - DNA, 15 bp, Homo sapiens
ggtcatcactcttct

SEQ ID NO: 42302 - DNA, 15 bp, Homo sapiens
gtcatcactcttctc

SEQ ID NO: 42303 - DNA, 15 bp, Homo sapiens
tcatcactcttctca

SEQ ID NO: 42304 - DNA, 15 bp, Homo sapiens
catcactcttctcac

SEQ ID NO: 42305 - DNA, 15 bp, Homo sapiens
atcactcttctcacc

SEQ ID NO: 42306 - DNA, 15 bp, Homo sapiens
tcactcttctcacct

SEQ ID NO: 42307 - DNA, 15 bp, Homo sapiens
cactcttctcacctg

SEQ ID NO: 42308 - DNA, 15 bp, Homo sapiens
actcttctcacctgg

SEQ ID NO: 42309 - DNA, 15 bp, Homo sapiens
ctcttctcacctggt

SEQ ID NO: 42310 - DNA, 15 bp, Homo sapiens
tcttctcacctggtg

SEQ ID NO: 42311 - DNA, 15 bp, Homo sapiens
cttctcacctggtgg

SEQ ID NO: 42312 - DNA, 15 bp, Homo sapiens
ttctcacctggtgga

SEQ ID NO: 42313 - DNA, 15 bp, Homo sapiens
tctcacctggtggaa

SEQ ID NO: 42314 - DNA, 15 bp, Homo sapiens
ctcacctggtggaac

SEQ ID NO: 42315 - DNA, 15 bp, Homo sapiens
tcacctggtggaact

SEQ ID NO: 42316 - DNA, 15 bp, Homo sapiens
cacctggtggaactg

SEQ ID NO: 42317 - DNA, 15 bp, Homo sapiens
acctggtggaactgt

SEQ ID NO: 42318 - DNA, 15 bp, Homo sapiens
cctggtggaactgta

SEQ ID NO: 42319 - DNA, 15 bp, Homo sapiens
ctggtggaactgtag

SEQ ID NO: 42320 - DNA, 15 bp, Homo sapiens
tggtggaactgtagg

SEQ ID NO: 42321 - DNA, 15 bp, Homo sapiens
ggtggaactgtaggg

SEQ ID NO: 42322 - DNA, 15 bp, Homo sapiens
gtggaactgtaggga

SEQ ID NO: 42323 - DNA, 15 bp, Homo sapiens
tggaactgtagggag

SEQ ID NO: 42324 - DNA, 15 bp, Homo sapiens
ggaactgtagggaga

SEQ ID NO: 42325 - DNA, 15 bp, Homo sapiens
gaactgtagggagaa

SEQ ID NO: 42326 - DNA, 15 bp, Homo sapiens
aactgtagggagaaa

SEQ ID NO: 42327 - DNA, 15 bp, Homo sapiens
actgtagggagaaag

SEQ ID NO: 42328 - DNA, 15 bp, Homo sapiens
ctgtagggagaaagc

SEQ ID NO: 42329 - DNA, 15 bp, Homo sapiens
tgtagggagaaagca

SEQ ID NO: 42330 - DNA, 15 bp, Homo sapiens
gtagggagaaagcag

SEQ ID NO: 42331 - DNA, 15 bp, Homo sapiens
tagggagaaagcaga

SEQ ID NO: 42332 - DNA, 15 bp, Homo sapiens
agggagaaagcagaa

SEQ ID NO: 42333 - DNA, 15 bp, Homo sapiens
gggagaaagcagaaa

SEQ ID NO: 42334 - DNA, 15 bp, Homo sapiens
ggagaaagcagaaac

SEQ ID NO: 42335 - DNA, 15 bp, Homo sapiens
gagaaagcagaaaca

SEQ ID NO: 42336 - DNA, 15 bp, Homo sapiens
agaaagcagaaacaa

SEQ ID NO: 42337 - DNA, 15 bp, Homo sapiens
gaaagcagaaacaag

SEQ ID NO: 42338 - DNA, 15 bp, Homo sapiens
aaagcagaaacaaga

SEQ ID NO: 42339 - DNA, 15 bp, Homo sapiens
aagcagaaacaagac

SEQ ID NO: 42340 - DNA, 15 bp, Homo sapiens
agcagaaacaagaca

SEQ ID NO: 42341 - DNA, 15 bp, Homo sapiens
gcagaaacaagacag

SEQ ID NO: 42342 - DNA, 15 bp, Homo sapiens
cagaaacaagacaga

SEQ ID NO: 42343 - DNA, 15 bp, Homo sapiens
agaaacaagacagaa

SEQ ID NO: 42344 - DNA, 15 bp, Homo sapiens
gaaacaagacagaaa

SEQ ID NO: 42345 - DNA, 15 bp, Homo sapiens
aaacaagacagaaaa

SEQ ID NO: 42346 - DNA, 15 bp, Homo sapiens
aacaagacagaaaac

SEQ ID NO: 42347 - DNA, 15 bp, Homo sapiens
acaagacagaaaact

SEQ ID NO: 42348 - DNA, 15 bp, Homo sapiens
caagacagaaaactg

SEQ ID NO: 42349 - DNA, 15 bp, Homo sapiens
aagacagaaaactgg

SEQ ID NO: 42350 - DNA, 15 bp, Homo sapiens
agacagaaaactggt

SEQ ID NO: 42351 - DNA, 15 bp, Homo sapiens
gacagaaaactggtt

SEQ ID NO: 42352 - DNA, 15 bp, Homo sapiens
acagaaaactggtta

SEQ ID NO: 42353 - DNA, 15 bp, Homo sapiens
cagaaaactggttag

SEQ ID NO: 42354 - DNA, 15 bp, Homo sapiens
agaaaactggttagg

SEQ ID NO: 42355 - DNA, 15 bp, Homo sapiens
gaaaactggttaggg

SEQ ID NO: 42356 - DNA, 15 bp, Homo sapiens
aaaactggttagggc

SEQ ID NO: 42357 - DNA, 15 bp, Homo sapiens
aaactggttagggct

SEQ ID NO: 42358 - DNA, 15 bp, Homo sapiens
aactggttagggctt

SEQ ID NO: 42359 - DNA, 15 bp, Homo sapiens
actggttagggcttt

SEQ ID NO: 42360 - DNA, 15 bp, Homo sapiens
ctggttagggctttc

SEQ ID NO: 42361 - DNA, 15 bp, Homo sapiens
tggttagggctttct

SEQ ID NO: 42362 - DNA, 15 bp, Homo sapiens
ggttagggctttctt

SEQ ID NO: 42363 - DNA, 15 bp, Homo sapiens
gttagggctttcttt

SEQ ID NO: 42364 - DNA, 15 bp, Homo sapiens
ttagggctttctttc

SEQ ID NO: 42365 - DNA, 15 bp, Homo sapiens
tagggctttctttca

SEQ ID NO: 42366 - DNA, 15 bp, Homo sapiens
agggctttctttcac

SEQ ID NO: 42367 - DNA, 15 bp, Homo sapiens
gggctttctttcacc

SEQ ID NO: 42368 - DNA, 15 bp, Homo sapiens
ggctttctttcaccg

SEQ ID NO: 42369 - DNA, 15 bp, Homo sapiens
gctttctttcaccgg

SEQ ID NO: 42370 - DNA, 15 bp, Homo sapiens
ctttctttcaccggg

SEQ ID NO: 42371 - DNA, 15 bp, Homo sapiens
tttctttcaccggga

SEQ ID NO: 42372 - DNA, 15 bp, Homo sapiens
ttctttcaccgggat

SEQ ID NO: 42373 - DNA, 15 bp, Homo sapiens
tctttcaccgggatg

SEQ ID NO: 42374 - DNA, 15 bp, Homo sapiens
ctttcaccgggatgc

SEQ ID NO: 42375 - DNA, 15 bp, Homo sapiens
tttcaccgggatgcc

SEQ ID NO: 42376 - DNA, 15 bp, Homo sapiens
ttcaccgggatgcca

SEQ ID NO: 42377 - DNA, 15 bp, Homo sapiens
tcaccgggatgccat

SEQ ID NO: 42378 - DNA, 15 bp, Homo sapiens
caccgggatgccatg

SEQ ID NO: 42379 - DNA, 15 bp, Homo sapiens
accgggatgccatgt

SEQ ID NO: 42380 - DNA, 15 bp, Homo sapiens
ccgggatgccatgtg

SEQ ID NO: 42381 - DNA, 15 bp, Homo sapiens
cgggatgccatgtgg

SEQ ID NO: 42382 - DNA, 15 bp, Homo sapiens
gggatgccatgtggc

SEQ ID NO: 42383 - DNA, 15 bp, Homo sapiens
ggatgccatgtggcc

SEQ ID NO: 42384 - DNA, 15 bp, Homo sapiens
gatgccatgtggccc

SEQ ID NO: 42385 - DNA, 15 bp, Homo sapiens
atgccatgtggccca

SEQ ID NO: 42386 - DNA, 15 bp, Homo sapiens
tgccatgtggcccat

SEQ ID NO: 42387 - DNA, 15 bp, Homo sapiens
gccatgtggcccatc

SEQ ID NO: 42388 - DNA, 15 bp, Homo sapiens
ccatgtggcccatct

SEQ ID NO: 42389 - DNA, 15 bp, Homo sapiens
catgtggcccatctg

SEQ ID NO: 42390 - DNA, 15 bp, Homo sapiens
atgtggcccatctga

SEQ ID NO: 42391 - DNA, 15 bp, Homo sapiens
tgtggcccatctgat

SEQ ID NO: 42392 - DNA, 15 bp, Homo sapiens
gtggcccatctgatt

SEQ ID NO: 42393 - DNA, 15 bp, Homo sapiens
tggcccatctgattg

SEQ ID NO: 42394 - DNA, 15 bp, Homo sapiens
ggcccatctgattgt

SEQ ID NO: 42395 - DNA, 15 bp, Homo sapiens
gcccatctgattgta

SEQ ID NO: 42396 - DNA, 15 bp, Homo sapiens
cccatctgattgtaa

SEQ ID NO: 42397 - DNA, 15 bp, Homo sapiens
ccatctgattgtaat

SEQ ID NO: 42398 - DNA, 15 bp, Homo sapiens
catctgattgtaatt

SEQ ID NO: 42399 - DNA, 15 bp, Homo sapiens
atctgattgtaattc

SEQ ID NO: 42400 - DNA, 15 bp, Homo sapiens
tctgattgtaattcc

SEQ ID NO: 42401 - DNA, 15 bp, Homo sapiens
ctgattgtaattcca

SEQ ID NO: 42402 - DNA, 15 bp, Homo sapiens
tgattgtaattccag

SEQ ID NO: 42403 - DNA, 15 bp, Homo sapiens
gattgtaattccagg

SEQ ID NO: 42404 - DNA, 15 bp, Homo sapiens
attgtaattccaggc

SEQ ID NO: 42405 - DNA, 15 bp, Homo sapiens
ttgtaattccaggcc

SEQ ID NO: 42406 - DNA, 15 bp, Homo sapiens
tgtaattccaggcca

SEQ ID NO: 42407 - DNA, 15 bp, Homo sapiens
gtaattccaggccat

SEQ ID NO: 42408 - DNA, 15 bp, Homo sapiens
taattccaggccatt

SEQ ID NO: 42409 - DNA, 15 bp, Homo sapiens
aattccaggccattc

SEQ ID NO: 42410 - DNA, 15 bp, Homo sapiens
attccaggccattct

SEQ ID NO: 42411 - DNA, 15 bp, Homo sapiens
ttccaggccattctg

SEQ ID NO: 42412 - DNA, 15 bp, Homo sapiens
tccaggccattctgc

SEQ ID NO: 42413 - DNA, 15 bp, Homo sapiens
ccaggccattctgca

SEQ ID NO: 42414 - DNA, 15 bp, Homo sapiens
caggccattctgcag

SEQ ID NO: 42415 - DNA, 15 bp, Homo sapiens
aggccattctgcagg

SEQ ID NO: 42416 - DNA, 15 bp, Homo sapiens
ggccattctgcaggg

SEQ ID NO: 42417 - DNA, 15 bp, Homo sapiens
gccattctgcagggt

SEQ ID NO: 42418 - DNA, 15 bp, Homo sapiens
ccattctgcagggtc

SEQ ID NO: 42419 - DNA, 15 bp, Homo sapiens
cattctgcagggtca

SEQ ID NO: 42420 - DNA, 15 bp, Homo sapiens
attctgcagggtcaa

SEQ ID NO: 42421 - DNA, 15 bp, Homo sapiens
ttctgcagggtcaag

SEQ ID NO: 42422 - DNA, 15 bp, Homo sapiens
tctgcagggtcaagg

SEQ ID NO: 42423 - DNA, 15 bp, Homo sapiens
ctgcagggtcaaggt

SEQ ID NO: 42424 - DNA, 15 bp, Homo sapiens
tgcagggtcaaggtt

SEQ ID NO: 42425 - DNA, 15 bp, Homo sapiens
gcagggtcaaggttt

SEQ ID NO: 42426 - DNA, 15 bp, Homo sapiens
cagggtcaaggtttt

SEQ ID NO: 42427 - DNA, 15 bp, Homo sapiens
agggtcaaggttttt

SEQ ID NO: 42428 - DNA, 15 bp, Homo sapiens
gggtcaaggtttttt

SEQ ID NO: 42429 - DNA, 15 bp, Homo sapiens
ggtcaaggttttttt

SEQ ID NO: 42430 - DNA, 15 bp, Homo sapiens
gtcaaggttttttta

SEQ ID NO: 42431 - DNA, 15 bp, Homo sapiens
tcaaggtttttttat

SEQ ID NO: 42432 - DNA, 15 bp, Homo sapiens
caaggtttttttatg

SEQ ID NO: 42433 - DNA, 15 bp, Homo sapiens
aaggtttttttatgt

SEQ ID NO: 42434 - DNA, 15 bp, Homo sapiens
aggtttttttatgtc

SEQ ID NO: 42435 - DNA, 15 bp, Homo sapiens
ggtttttttatgtct

SEQ ID NO: 42436 - DNA, 15 bp, Homo sapiens
gtttttttatgtctt

SEQ ID NO: 42437 - DNA, 15 bp, Homo sapiens
tttttttatgtcttg

SEQ ID NO: 42438 - DNA, 15 bp, Homo sapiens
ttttttatgtcttgg

SEQ ID NO: 42439 - DNA, 15 bp, Homo sapiens
tttttatgtcttggt

SEQ ID NO: 42440 - DNA, 15 bp, Homo sapiens
ttttatgtcttggtg

SEQ ID NO: 42441 - DNA, 15 bp, Homo sapiens
tttatgtcttggtga

SEQ ID NO: 42442 - DNA, 15 bp, Homo sapiens
ttatgtcttggtgat

SEQ ID NO: 42443 - DNA, 15 bp, Homo sapiens
tatgtcttggtgata

SEQ ID NO: 42444 - DNA, 15 bp, Homo sapiens
atgtcttggtgataa

SEQ ID NO: 42445 - DNA, 15 bp, Homo sapiens
tgtcttggtgataaa

SEQ ID NO: 42446 - DNA, 15 bp, Homo sapiens
gtcttggtgataaac

SEQ ID NO: 42447 - DNA, 15 bp, Homo sapiens
tcttggtgataaact

SEQ ID NO: 42448 - DNA, 15 bp, Homo sapiens
cttggtgataaactc

SEQ ID NO: 42449 - DNA, 15 bp, Homo sapiens
ttggtgataaactcc

SEQ ID NO: 42450 - DNA, 15 bp, Homo sapiens
tggtgataaactcca

SEQ ID NO: 42451 - DNA, 15 bp, Homo sapiens
ggtgataaactccag

SEQ ID NO: 42452 - DNA, 15 bp, Homo sapiens
gtgataaactccagc

SEQ ID NO: 42453 - DNA, 15 bp, Homo sapiens
tgataaactccagct

SEQ ID NO: 42454 - DNA, 15 bp, Homo sapiens
gataaactccagctg

SEQ ID NO: 42455 - DNA, 15 bp, Homo sapiens
ataaactccagctgc

SEQ ID NO: 42456 - DNA, 15 bp, Homo sapiens
taaactccagctgca

SEQ ID NO: 42457 - DNA, 15 bp, Homo sapiens
aaactccagctgcac

SEQ ID NO: 42458 - DNA, 15 bp, Homo sapiens
aactccagctgcacc

SEQ ID NO: 42459 - DNA, 15 bp, Homo sapiens
actccagctgcacca

SEQ ID NO: 42460 - DNA, 15 bp, Homo sapiens
ctccagctgcaccag

SEQ ID NO: 42461 - DNA, 15 bp, Homo sapiens
tccagctgcaccaga

SEQ ID NO: 42462 - DNA, 15 bp, Homo sapiens
ccagctgcaccagac

SEQ ID NO: 42463 - DNA, 15 bp, Homo sapiens
cagctgcaccagaca

SEQ ID NO: 42464 - DNA, 15 bp, Homo sapiens
agctgcaccagacac

SEQ ID NO: 42465 - DNA, 15 bp, Homo sapiens
gctgcaccagacaca

SEQ ID NO: 42466 - DNA, 15 bp, Homo sapiens
ctgcaccagacacaa

SEQ ID NO: 42467 - DNA, 15 bp, Homo sapiens
tgcaccagacacaaa

SEQ ID NO: 42468 - DNA, 15 bp, Homo sapiens
gcaccagacacaaat

SEQ ID NO: 42469 - DNA, 15 bp, Homo sapiens
caccagacacaaatc

SEQ ID NO: 42470 - DNA, 15 bp, Homo sapiens
accagacacaaatca

SEQ ID NO: 42471 - DNA, 15 bp, Homo sapiens
ccagacacaaatcag

SEQ ID NO: 42472 - DNA, 15 bp, Homo sapiens
cagacacaaatcagt

SEQ ID NO: 42473 - DNA, 15 bp, Homo sapiens
agacacaaatcagtg

SEQ ID NO: 42474 - DNA, 15 bp, Homo sapiens
gacacaaatcagtgt

SEQ ID NO: 42475 - DNA, 15 bp, Homo sapiens
acacaaatcagtgtc

SEQ ID NO: 42476 - DNA, 15 bp, Homo sapiens
cacaaatcagtgtca

SEQ ID NO: 42477 - DNA, 15 bp, Homo sapiens
acaaatcagtgtcag

SEQ ID NO: 42478 - DNA, 15 bp, Homo sapiens
caaatcagtgtcagt

SEQ ID NO: 42479 - DNA, 15 bp, Homo sapiens
aaatcagtgtcagta

SEQ ID NO: 42480 - DNA, 15 bp, Homo sapiens
aatcagtgtcagtag

SEQ ID NO: 42481 - DNA, 15 bp, Homo sapiens
atcagtgtcagtagt

SEQ ID NO: 42482 - DNA, 15 bp, Homo sapiens
tcagtgtcagtagtg

SEQ ID NO: 42483 - DNA, 15 bp, Homo sapiens
cagtgtcagtagtgt

SEQ ID NO: 42484 - DNA, 15 bp, Homo sapiens
agtgtcagtagtgtg

SEQ ID NO: 42485 - DNA, 15 bp, Homo sapiens
gtgtcagtagtgtgc

SEQ ID NO: 42486 - DNA, 15 bp, Homo sapiens
tgtcagtagtgtgct

SEQ ID NO: 42487 - DNA, 15 bp, Homo sapiens
gtcagtagtgtgctg

SEQ ID NO: 42488 - DNA, 15 bp, Homo sapiens
tcagtagtgtgctgt

SEQ ID NO: 42489 - DNA, 15 bp, Homo sapiens
cagtagtgtgctgta

SEQ ID NO: 42490 - DNA, 15 bp, Homo sapiens
agtagtgtgctgtat

SEQ ID NO: 42491 - DNA, 15 bp, Homo sapiens
gtagtgtgctgtatg

SEQ ID NO: 42492 - DNA, 15 bp, Homo sapiens
tagtgtgctgtatgt

SEQ ID NO: 42493 - DNA, 15 bp, Homo sapiens
agtgtgctgtatgtg

SEQ ID NO: 42494 - DNA, 15 bp, Homo sapiens
gtgtgctgtatgtgg

SEQ ID NO: 42495 - DNA, 15 bp, Homo sapiens
tgtgctgtatgtggt

SEQ ID NO: 42496 - DNA, 15 bp, Homo sapiens
gtgctgtatgtggtt

SEQ ID NO: 42497 - DNA, 15 bp, Homo sapiens
tgctgtatgtggttt

SEQ ID NO: 42498 - DNA, 15 bp, Homo sapiens
gctgtatgtggttta

SEQ ID NO: 42499 - DNA, 15 bp, Homo sapiens
ctgtatgtggtttaa

SEQ ID NO: 42500 - DNA, 15 bp, Homo sapiens
tgtatgtggtttaat

SEQ ID NO: 42501 - DNA, 15 bp, Homo sapiens
gtatgtggtttaata

SEQ ID NO: 42502 - DNA, 15 bp, Homo sapiens
tatgtggtttaatat

SEQ ID NO: 42503 - DNA, 15 bp, Homo sapiens
atgtggtttaatata

SEQ ID NO: 42504 - DNA, 15 bp, Homo sapiens
tgtggtttaatataa

SEQ ID NO: 42505 - DNA, 15 bp, Homo sapiens
gtggtttaatataaa

SEQ ID NO: 42506 - DNA, 15 bp, Homo sapiens
tggtttaatataaac

SEQ ID NO: 42507 - DNA, 15 bp, Homo sapiens
ggtttaatataaacc

SEQ ID NO: 42508 - DNA, 15 bp, Homo sapiens
gtttaatataaacca

SEQ ID NO: 42509 - DNA, 15 bp, Homo sapiens
tttaatataaaccag

SEQ ID NO: 42510 - DNA, 15 bp, Homo sapiens
ttaatataaaccaga

SEQ ID NO: 42511 - DNA, 15 bp, Homo sapiens
taatataaaccagag

SEQ ID NO: 42512 - DNA, 15 bp, Homo sapiens
aatataaaccagaga

SEQ ID NO: 42513 - DNA, 15 bp, Homo sapiens
atataaaccagagac

SEQ ID NO: 42514 - DNA, 15 bp, Homo sapiens
tataaaccagagaca

SEQ ID NO: 42515 - DNA, 15 bp, Homo sapiens
ataaaccagagacat

SEQ ID NO: 42516 - DNA, 15 bp, Homo sapiens
taaaccagagacatg

SEQ ID NO: 42517 - DNA, 15 bp, Homo sapiens
aaaccagagacatgc

SEQ ID NO: 42518 - DNA, 15 bp, Homo sapiens
aaccagagacatgca

SEQ ID NO: 42519 - DNA, 15 bp, Homo sapiens
accagagacatgcag

SEQ ID NO: 42520 - DNA, 15 bp, Homo sapiens
ccagagacatgcagt

SEQ ID NO: 42521 - DNA, 15 bp, Homo sapiens
cagagacatgcagtg

SEQ ID NO: 42522 - DNA, 15 bp, Homo sapiens
agagacatgcagtgt

SEQ ID NO: 42523 - DNA, 15 bp, Homo sapiens
gagacatgcagtgtt

SEQ ID NO: 42524 - DNA, 15 bp, Homo sapiens
agacatgcagtgttt

SEQ ID NO: 42525 - DNA, 15 bp, Homo sapiens
gacatgcagtgtttc

SEQ ID NO: 42526 - DNA, 15 bp, Homo sapiens
acatgcagtgtttcc

SEQ ID NO: 42527 - DNA, 15 bp, Homo sapiens
catgcagtgtttccc

SEQ ID NO: 42528 - DNA, 15 bp, Homo sapiens
atgcagtgtttcccc

SEQ ID NO: 42529 - DNA, 15 bp, Homo sapiens
tgcagtgtttccccc

SEQ ID NO: 42530 - DNA, 15 bp, Homo sapiens
gcagtgtttccccca

SEQ ID NO: 42531 - DNA, 15 bp, Homo sapiens
cagtgtttcccccaa

SEQ ID NO: 42532 - DNA, 15 bp, Homo sapiens
agtgtttcccccaag

SEQ ID NO: 42533 - DNA, 15 bp, Homo sapiens
gtgtttcccccaaga

SEQ ID NO: 42534 - DNA, 15 bp, Homo sapiens
tgtttcccccaagat

SEQ ID NO: 42535 - DNA, 15 bp, Homo sapiens
gtttcccccaagatc

SEQ ID NO: 42536 - DNA, 15 bp, Homo sapiens
tttcccccaagatct

SEQ ID NO: 42537 - DNA, 15 bp, Homo sapiens
ttcccccaagatcta

SEQ ID NO: 42538 - DNA, 15 bp, Homo sapiens
tcccccaagatctag

SEQ ID NO: 42539 - DNA, 15 bp, Homo sapiens
cccccaagatctagc

SEQ ID NO: 42540 - DNA, 15 bp, Homo sapiens
ccccaagatctagca

SEQ ID NO: 42541 - DNA, 15 bp, Homo sapiens
cccaagatctagcat

SEQ ID NO: 42542 - DNA, 15 bp, Homo sapiens
ccaagatctagcata

SEQ ID NO: 42543 - DNA, 15 bp, Homo sapiens
caagatctagcatat

SEQ ID NO: 42544 - DNA, 15 bp, Homo sapiens
aagatctagcatata

SEQ ID NO: 42545 - DNA, 15 bp, Homo sapiens
agatctagcatataa

SEQ ID NO: 42546 - DNA, 15 bp, Homo sapiens
gatctagcatataaa

SEQ ID NO: 42547 - DNA, 15 bp, Homo sapiens
atctagcatataaac

SEQ ID NO: 42548 - DNA, 15 bp, Homo sapiens
tctagcatataaacc

SEQ ID NO: 42549 - DNA, 15 bp, Homo sapiens
ctagcatataaacct

SEQ ID NO: 42550 - DNA, 15 bp, Homo sapiens
tagcatataaacctg

SEQ ID NO: 42551 - DNA, 15 bp, Homo sapiens
agcatataaacctga

SEQ ID NO: 42552 - DNA, 15 bp, Homo sapiens
gcatataaacctgag

SEQ ID NO: 42553 - DNA, 15 bp, Homo sapiens
catataaacctgaga

SEQ ID NO: 42554 - DNA, 15 bp, Homo sapiens
atataaacctgagat

SEQ ID NO: 42555 - DNA, 15 bp, Homo sapiens
tataaacctgagatt

SEQ ID NO: 42556 - DNA, 15 bp, Homo sapiens
ataaacctgagatta

SEQ ID NO: 42557 - DNA, 15 bp, Homo sapiens
taaacctgagattag

SEQ ID NO: 42558 - DNA, 15 bp, Homo sapiens
aaacctgagattaga

SEQ ID NO: 42559 - DNA, 15 bp, Homo sapiens
aacctgagattagat

SEQ ID NO: 42560 - DNA, 15 bp, Homo sapiens
acctgagattagatg

SEQ ID NO: 42561 - DNA, 15 bp, Homo sapiens
cctgagattagatgg

SEQ ID NO: 42562 - DNA, 15 bp, Homo sapiens
ctgagattagatggc

SEQ ID NO: 42563 - DNA, 15 bp, Homo sapiens
tgagattagatggct

SEQ ID NO: 42564 - DNA, 15 bp, Homo sapiens
gagattagatggctt

SEQ ID NO: 42565 - DNA, 15 bp, Homo sapiens
agattagatggcttc

SEQ ID NO: 42566 - DNA, 15 bp, Homo sapiens
gattagatggcttct

SEQ ID NO: 42567 - DNA, 15 bp, Homo sapiens
attagatggcttcta

SEQ ID NO: 42568 - DNA, 15 bp, Homo sapiens
ttagatggcttctaa

SEQ ID NO: 42569 - DNA, 15 bp, Homo sapiens
tagatggcttctaag

SEQ ID NO: 42570 - DNA, 15 bp, Homo sapiens
agatggcttctaagc

SEQ ID NO: 42571 - DNA, 15 bp, Homo sapiens
gatggcttctaagca

SEQ ID NO: 42572 - DNA, 15 bp, Homo sapiens
atggcttctaagcaa

SEQ ID NO: 42573 - DNA, 15 bp, Homo sapiens
tggcttctaagcaag

SEQ ID NO: 42574 - DNA, 15 bp, Homo sapiens
ggcttctaagcaagt

SEQ ID NO: 42575 - DNA, 15 bp, Homo sapiens
gcttctaagcaagtg

SEQ ID NO: 42576 - DNA, 15 bp, Homo sapiens
cttctaagcaagtgc

SEQ ID NO: 42577 - DNA, 15 bp, Homo sapiens
ttctaagcaagtgca

SEQ ID NO: 42578 - DNA, 15 bp, Homo sapiens
tctaagcaagtgcaa

SEQ ID NO: 42579 - DNA, 15 bp, Homo sapiens
ctaagcaagtgcaaa

SEQ ID NO: 42580 - DNA, 15 bp, Homo sapiens
taagcaagtgcaaaa

SEQ ID NO: 42581 - DNA, 15 bp, Homo sapiens
aagcaagtgcaaaaa

SEQ ID NO: 42582 - DNA, 15 bp, Homo sapiens
agcaagtgcaaaaat

SEQ ID NO: 42583 - DNA, 15 bp, Homo sapiens
gcaagtgcaaaaatt

SEQ ID NO: 42584 - DNA, 15 bp, Homo sapiens
caagtgcaaaaattg

SEQ ID NO: 42585 - DNA, 15 bp, Homo sapiens
aagtgcaaaaattgt

SEQ ID NO: 42586 - DNA, 15 bp, Homo sapiens
agtgcaaaaattgtg

SEQ ID NO: 42587 - DNA, 15 bp, Homo sapiens
gtgcaaaaattgtgg

SEQ ID NO: 42588 - DNA, 15 bp, Homo sapiens
tgcaaaaattgtggc

SEQ ID NO: 42589 - DNA, 15 bp, Homo sapiens
gcaaaaattgtggct

SEQ ID NO: 42590 - DNA, 15 bp, Homo sapiens
caaaaattgtggctt

SEQ ID NO: 42591 - DNA, 15 bp, Homo sapiens
aaaaattgtggcttc

SEQ ID NO: 42592 - DNA, 15 bp, Homo sapiens
aaaattgtggcttca

SEQ ID NO: 42593 - DNA, 15 bp, Homo sapiens
aaattgtggcttcaa

SEQ ID NO: 42594 - DNA, 15 bp, Homo sapiens
aattgtggcttcaag

SEQ ID NO: 42595 - DNA, 15 bp, Homo sapiens
attgtggcttcaagt

SEQ ID NO: 42596 - DNA, 15 bp, Homo sapiens
ttgtggcttcaagtt

SEQ ID NO: 42597 - DNA, 15 bp, Homo sapiens
tgtggcttcaagttc

SEQ ID NO: 42598 - DNA, 15 bp, Homo sapiens
gtggcttcaagttct

SEQ ID NO: 42599 - DNA, 15 bp, Homo sapiens
tggcttcaagttctc

SEQ ID NO: 42600 - DNA, 15 bp, Homo sapiens
ggcttcaagttctcc

SEQ ID NO: 42601 - DNA, 15 bp, Homo sapiens
gcttcaagttctcct

SEQ ID NO: 42602 - DNA, 15 bp, Homo sapiens
cttcaagttctcctt

SEQ ID NO: 42603 - DNA, 15 bp, Homo sapiens
ttcaagttctccttc

SEQ ID NO: 42604 - DNA, 15 bp, Homo sapiens
tcaagttctccttct

SEQ ID NO: 42605 - DNA, 15 bp, Homo sapiens
caagttctccttctt

SEQ ID NO: 42606 - DNA, 15 bp, Homo sapiens
aagttctccttcttc

SEQ ID NO: 42607 - DNA, 15 bp, Homo sapiens
agttctccttcttcc

SEQ ID NO: 42608 - DNA, 15 bp, Homo sapiens
gttctccttcttccc

SEQ ID NO: 42609 - DNA, 15 bp, Homo sapiens
ttctccttcttccca

SEQ ID NO: 42610 - DNA, 15 bp, Homo sapiens
tctccttcttcccac

SEQ ID NO: 42611 - DNA, 15 bp, Homo sapiens
ctccttcttcccact

SEQ ID NO: 42612 - DNA, 15 bp, Homo sapiens
tccttcttcccactt

SEQ ID NO: 42613 - DNA, 15 bp, Homo sapiens
ccttcttcccacttt

SEQ ID NO: 42614 - DNA, 15 bp, Homo sapiens
cttcttcccacttta

SEQ ID NO: 42615 - DNA, 15 bp, Homo sapiens
ttcttcccactttag

SEQ ID NO: 42616 - DNA, 15 bp, Homo sapiens
tcttcccactttagc

SEQ ID NO: 42617 - DNA, 15 bp, Homo sapiens
cttcccactttagca

SEQ ID NO: 42618 - DNA, 15 bp, Homo sapiens
ttcccactttagcag

SEQ ID NO: 42619 - DNA, 15 bp, Homo sapiens
tcccactttagcagc

SEQ ID NO: 42620 - DNA, 15 bp, Homo sapiens
cccactttagcagct

SEQ ID NO: 42621 - DNA, 15 bp, Homo sapiens
ccactttagcagctt

SEQ ID NO: 42622 - DNA, 15 bp, Homo sapiens
cactttagcagcttt

SEQ ID NO: 42623 - DNA, 15 bp, Homo sapiens
actttagcagctttg

SEQ ID NO: 42624 - DNA, 15 bp, Homo sapiens
ctttagcagctttgt

SEQ ID NO: 42625 - DNA, 15 bp, Homo sapiens
tttagcagctttgta

SEQ ID NO: 42626 - DNA, 15 bp, Homo sapiens
ttagcagctttgtaa

SEQ ID NO: 42627 - DNA, 15 bp, Homo sapiens
tagcagctttgtaag

SEQ ID NO: 42628 - DNA, 15 bp, Homo sapiens
agcagctttgtaagt

SEQ ID NO: 42629 - DNA, 15 bp, Homo sapiens
gcagctttgtaagtt

SEQ ID NO: 42630 - DNA, 15 bp, Homo sapiens
cagctttgtaagttt

SEQ ID NO: 42631 - DNA, 15 bp, Homo sapiens
agctttgtaagttta

SEQ ID NO: 42632 - DNA, 15 bp, Homo sapiens
gctttgtaagtttaa

SEQ ID NO: 42633 - DNA, 15 bp, Homo sapiens
ctttgtaagtttaat

SEQ ID NO: 42634 - DNA, 15 bp, Homo sapiens
tttgtaagtttaatt

SEQ ID NO: 42635 - DNA, 15 bp, Homo sapiens
ttgtaagtttaattt

SEQ ID NO: 42636 - DNA, 15 bp, Homo sapiens
tgtaagtttaatttt

SEQ ID NO: 42637 - DNA, 15 bp, Homo sapiens
gtaagtttaattttt

SEQ ID NO: 42638 - DNA, 15 bp, Homo sapiens
taagtttaattttta

SEQ ID NO: 42639 - DNA, 15 bp, Homo sapiens
aagtttaatttttaa

SEQ ID NO: 42640 - DNA, 15 bp, Homo sapiens
agtttaatttttaat

SEQ ID NO: 42641 - DNA, 15 bp, Homo sapiens
gtttaatttttaatg

SEQ ID NO: 42642 - DNA, 15 bp, Homo sapiens
tttaatttttaatga

SEQ ID NO: 42643 - DNA, 15 bp, Homo sapiens
ttaatttttaatgat

SEQ ID NO: 42644 - DNA, 15 bp, Homo sapiens
taatttttaatgatc

SEQ ID NO: 42645 - DNA, 15 bp, Homo sapiens
aatttttaatgatct

SEQ ID NO: 42646 - DNA, 15 bp, Homo sapiens
atttttaatgatctc

SEQ ID NO: 42647 - DNA, 15 bp, Homo sapiens
tttttaatgatctct

SEQ ID NO: 42648 - DNA, 15 bp, Homo sapiens
ttttaatgatctctg

SEQ ID NO: 42649 - DNA, 15 bp, Homo sapiens
tttaatgatctctgc

SEQ ID NO: 42650 - DNA, 15 bp, Homo sapiens
ttaatgatctctgct

SEQ ID NO: 42651 - DNA, 15 bp, Homo sapiens
taatgatctctgctc

SEQ ID NO: 42652 - DNA, 15 bp, Homo sapiens
aatgatctctgctca

SEQ ID NO: 42653 - DNA, 15 bp, Homo sapiens
atgatctctgctcat

SEQ ID NO: 42654 - DNA, 15 bp, Homo sapiens
tgatctctgctcatg

SEQ ID NO: 42655 - DNA, 15 bp, Homo sapiens
gatctctgctcatgc

SEQ ID NO: 42656 - DNA, 15 bp, Homo sapiens
atctctgctcatgct

SEQ ID NO: 42657 - DNA, 15 bp, Homo sapiens
tctctgctcatgctg

SEQ ID NO: 42658 - DNA, 15 bp, Homo sapiens
ctctgctcatgctgt

SEQ ID NO: 42659 - DNA, 15 bp, Homo sapiens
tctgctcatgctgtc

SEQ ID NO: 42660 - DNA, 15 bp, Homo sapiens
ctgctcatgctgtca

SEQ ID NO: 42661 - DNA, 15 bp, Homo sapiens
tgctcatgctgtcac

SEQ ID NO: 42662 - DNA, 15 bp, Homo sapiens
gctcatgctgtcacg

SEQ ID NO: 42663 - DNA, 15 bp, Homo sapiens
ctcatgctgtcacga

SEQ ID NO: 42664 - DNA, 15 bp, Homo sapiens
tcatgctgtcacgag

SEQ ID NO: 42665 - DNA, 15 bp, Homo sapiens
catgctgtcacgaga

SEQ ID NO: 42666 - DNA, 15 bp, Homo sapiens
atgctgtcacgagaa

SEQ ID NO: 42667 - DNA, 15 bp, Homo sapiens
tgctgtcacgagaaa

SEQ ID NO: 42668 - DNA, 15 bp, Homo sapiens
gctgtcacgagaaac

SEQ ID NO: 42669 - DNA, 15 bp, Homo sapiens
ctgtcacgagaaaca

SEQ ID NO: 42670 - DNA, 15 bp, Homo sapiens
tgtcacgagaaacac

SEQ ID NO: 42671 - DNA, 15 bp, Homo sapiens
gtcacgagaaacaca

SEQ ID NO: 42672 - DNA, 15 bp, Homo sapiens
tcacgagaaacacaa

SEQ ID NO: 42673 - DNA, 15 bp, Homo sapiens
cacgagaaacacaaa

SEQ ID NO: 42674 - DNA, 15 bp, Homo sapiens
acgagaaacacaaaa

SEQ ID NO: 42675 - DNA, 15 bp, Homo sapiens
cgagaaacacaaaat

SEQ ID NO: 42676 - DNA, 15 bp, Homo sapiens
gagaaacacaaaatc

SEQ ID NO: 42677 - DNA, 15 bp, Homo sapiens
agaaacacaaaatca

SEQ ID NO: 42678 - DNA, 15 bp, Homo sapiens
gaaacacaaaatcat

SEQ ID NO: 42679 - DNA, 15 bp, Homo sapiens
aaacacaaaatcata

SEQ ID NO: 42680 - DNA, 15 bp, Homo sapiens
aacacaaaatcataa

SEQ ID NO: 42681 - DNA, 15 bp, Homo sapiens
acacaaaatcataaa

SEQ ID NO: 42682 - DNA, 15 bp, Homo sapiens
cacaaaatcataaat

SEQ ID NO: 42683 - DNA, 15 bp, Homo sapiens
acaaaatcataaatg

SEQ ID NO: 42684 - DNA, 15 bp, Homo sapiens
caaaatcataaatgt

SEQ ID NO: 42685 - DNA, 15 bp, Homo sapiens
aaaatcataaatgtt

SEQ ID NO: 42686 - DNA, 15 bp, Homo sapiens
aaatcataaatgtta

SEQ ID NO: 42687 - DNA, 15 bp, Homo sapiens
aatcataaatgttac

SEQ ID NO: 42688 - DNA, 15 bp, Homo sapiens
atcataaatgttact

SEQ ID NO: 42689 - DNA, 15 bp, Homo sapiens
tcataaatgttacta

SEQ ID NO: 42690 - DNA, 15 bp, Homo sapiens
cataaatgttactaa

SEQ ID NO: 42691 - DNA, 15 bp, Homo sapiens
ataaatgttactaag

SEQ ID NO: 42692 - DNA, 15 bp, Homo sapiens
taaatgttactaagc

SEQ ID NO: 42693 - DNA, 15 bp, Homo sapiens
aaatgttactaagca

SEQ ID NO: 42694 - DNA, 15 bp, Homo sapiens
aatgttactaagcaa

SEQ ID NO: 42695 - DNA, 15 bp, Homo sapiens
atgttactaagcaac

SEQ ID NO: 42696 - DNA, 15 bp, Homo sapiens
tgttactaagcaaca

SEQ ID NO: 42697 - DNA, 15 bp, Homo sapiens
gttactaagcaacaa

SEQ ID NO: 42698 - DNA, 15 bp, Homo sapiens
ttactaagcaacaac

SEQ ID NO: 42699 - DNA, 15 bp, Homo sapiens
tactaagcaacaact

SEQ ID NO: 42700 - DNA, 15 bp, Homo sapiens
actaagcaacaactg

SEQ ID NO: 42701 - DNA, 15 bp, Homo sapiens
ctaagcaacaactgc

SEQ ID NO: 42702 - DNA, 15 bp, Homo sapiens
taagcaacaactgca

SEQ ID NO: 42703 - DNA, 15 bp, Homo sapiens
aagcaacaactgcaa

SEQ ID NO: 42704 - DNA, 15 bp, Homo sapiens
agcaacaactgcaag

SEQ ID NO: 42705 - DNA, 15 bp, Homo sapiens
gcaacaactgcaagt

SEQ ID NO: 42706 - DNA, 15 bp, Homo sapiens
caacaactgcaagtg

SEQ ID NO: 42707 - DNA, 15 bp, Homo sapiens
aacaactgcaagtgt

SEQ ID NO: 42708 - DNA, 15 bp, Homo sapiens
acaactgcaagtgta

SEQ ID NO: 42709 - DNA, 15 bp, Homo sapiens
caactgcaagtgtaa

SEQ ID NO: 42710 - DNA, 15 bp, Homo sapiens
aactgcaagtgtaat

SEQ ID NO: 42711 - DNA, 15 bp, Homo sapiens
actgcaagtgtaatt

SEQ ID NO: 42712 - DNA, 15 bp, Homo sapiens
ctgcaagtgtaatta

SEQ ID NO: 42713 - DNA, 15 bp, Homo sapiens
tgcaagtgtaattaa

SEQ ID NO: 42714 - DNA, 15 bp, Homo sapiens
gcaagtgtaattaat

SEQ ID NO: 42715 - DNA, 15 bp, Homo sapiens
caagtgtaattaata

SEQ ID NO: 42716 - DNA, 15 bp, Homo sapiens
aagtgtaattaatag

SEQ ID NO: 42717 - DNA, 15 bp, Homo sapiens
agtgtaattaatagt

SEQ ID NO: 42718 - DNA, 15 bp, Homo sapiens
gtgtaattaatagta

SEQ ID NO: 42719 - DNA, 15 bp, Homo sapiens
tgtaattaatagtaa

SEQ ID NO: 42720 - DNA, 15 bp, Homo sapiens
gtaattaatagtaat

SEQ ID NO: 42721 - DNA, 15 bp, Homo sapiens
taattaatagtaatt

SEQ ID NO: 42722 - DNA, 15 bp, Homo sapiens
aattaatagtaattt

SEQ ID NO: 42723 - DNA, 15 bp, Homo sapiens
attaatagtaatttt

SEQ ID NO: 42724 - DNA, 15 bp, Homo sapiens
ttaatagtaattttt

SEQ ID NO: 42725 - DNA, 15 bp, Homo sapiens
taatagtaatttttt

SEQ ID NO: 42726 - DNA, 15 bp, Homo sapiens
aatagtaattttttt

SEQ ID NO: 42727 - DNA, 15 bp, Homo sapiens
atagtaatttttttc

SEQ ID NO: 42728 - DNA, 15 bp, Homo sapiens
tagtaatttttttca

SEQ ID NO: 42729 - DNA, 15 bp, Homo sapiens
agtaatttttttcaa

SEQ ID NO: 42730 - DNA, 15 bp, Homo sapiens
gtaatttttttcaag

SEQ ID NO: 42731 - DNA, 15 bp, Homo sapiens
taatttttttcaagt

SEQ ID NO: 42732 - DNA, 15 bp, Homo sapiens
aatttttttcaagtt

SEQ ID NO: 42733 - DNA, 15 bp, Homo sapiens
atttttttcaagtta

SEQ ID NO: 42734 - DNA, 15 bp, Homo sapiens
tttttttcaagttag

SEQ ID NO: 42735 - DNA, 15 bp, Homo sapiens
ttttttcaagttagc

SEQ ID NO: 42736 - DNA, 15 bp, Homo sapiens
tttttcaagttagca

SEQ ID NO: 42737 - DNA, 15 bp, Homo sapiens
ttttcaagttagcaa

SEQ ID NO: 42738 - DNA, 15 bp, Homo sapiens
tttcaagttagcaac

SEQ ID NO: 42739 - DNA, 15 bp, Homo sapiens
ttcaagttagcaaca

SEQ ID NO: 42740 - DNA, 15 bp, Homo sapiens
tcaagttagcaacat

SEQ ID NO: 42741 - DNA, 15 bp, Homo sapiens
caagttagcaacatg

SEQ ID NO: 42742 - DNA, 15 bp, Homo sapiens
aagttagcaacatgg

SEQ ID NO: 42743 - DNA, 15 bp, Homo sapiens
agttagcaacatggt

SEQ ID NO: 42744 - DNA, 15 bp, Homo sapiens
gttagcaacatggtc

SEQ ID NO: 42745 - DNA, 15 bp, Homo sapiens
ttagcaacatggtcc

SEQ ID NO: 42746 - DNA, 15 bp, Homo sapiens
tagcaacatggtcct

SEQ ID NO: 42747 - DNA, 15 bp, Homo sapiens
agcaacatggtcctt

SEQ ID NO: 42748 - DNA, 15 bp, Homo sapiens
gcaacatggtccttt

SEQ ID NO: 42749 - DNA, 15 bp, Homo sapiens
caacatggtcctttg

SEQ ID NO: 42750 - DNA, 15 bp, Homo sapiens
aacatggtcctttgc

SEQ ID NO: 42751 - DNA, 15 bp, Homo sapiens
acatggtcctttgca

SEQ ID NO: 42752 - DNA, 15 bp, Homo sapiens
catggtcctttgcag

SEQ ID NO: 42753 - DNA, 15 bp, Homo sapiens
atggtcctttgcagg

SEQ ID NO: 42754 - DNA, 15 bp, Homo sapiens
tggtcctttgcagga

SEQ ID NO: 42755 - DNA, 15 bp, Homo sapiens
ggtcctttgcaggaa

SEQ ID NO: 42756 - DNA, 15 bp, Homo sapiens
gtcctttgcaggaat

SEQ ID NO: 42757 - DNA, 15 bp, Homo sapiens
tcctttgcaggaatg

SEQ ID NO: 42758 - DNA, 15 bp, Homo sapiens
cctttgcaggaatgt

SEQ ID NO: 42759 - DNA, 15 bp, Homo sapiens
ctttgcaggaatgtg

SEQ ID NO: 42760 - DNA, 15 bp, Homo sapiens
tttgcaggaatgtgt

SEQ ID NO: 42761 - DNA, 15 bp, Homo sapiens
ttgcaggaatgtgtg

SEQ ID NO: 42762 - DNA, 15 bp, Homo sapiens
tgcaggaatgtgtga

SEQ ID NO: 42763 - DNA, 15 bp, Homo sapiens
gcaggaatgtgtgac

SEQ ID NO: 42764 - DNA, 15 bp, Homo sapiens
caggaatgtgtgaca

SEQ ID NO: 42765 - DNA, 15 bp, Homo sapiens
aggaatgtgtgacag

SEQ ID NO: 42766 - DNA, 15 bp, Homo sapiens
ggaatgtgtgacagg

SEQ ID NO: 42767 - DNA, 15 bp, Homo sapiens
gaatgtgtgacagga

SEQ ID NO: 42768 - DNA, 15 bp, Homo sapiens
aatgtgtgacaggaa

SEQ ID NO: 42769 - DNA, 15 bp, Homo sapiens
atgtgtgacaggaac

SEQ ID NO: 42770 - DNA, 15 bp, Homo sapiens
tgtgtgacaggaaca

SEQ ID NO: 42771 - DNA, 15 bp, Homo sapiens
gtgtgacaggaacag

SEQ ID NO: 42772 - DNA, 15 bp, Homo sapiens
tgtgacaggaacagc

SEQ ID NO: 42773 - DNA, 15 bp, Homo sapiens
gtgacaggaacagca

SEQ ID NO: 42774 - DNA, 15 bp, Homo sapiens
tgacaggaacagcag

SEQ ID NO: 42775 - DNA, 15 bp, Homo sapiens
gacaggaacagcagt

SEQ ID NO: 42776 - DNA, 15 bp, Homo sapiens
acaggaacagcagtg

SEQ ID NO: 42777 - DNA, 15 bp, Homo sapiens
caggaacagcagtgg

SEQ ID NO: 42778 - DNA, 15 bp, Homo sapiens
aggaacagcagtggc

SEQ ID NO: 42779 - DNA, 15 bp, Homo sapiens
ggaacagcagtggcc

SEQ ID NO: 42780 - DNA, 15 bp, Homo sapiens
gaacagcagtggcct

SEQ ID NO: 42781 - DNA, 15 bp, Homo sapiens
aacagcagtggcctg

SEQ ID NO: 42782 - DNA, 15 bp, Homo sapiens
acagcagtggcctga

SEQ ID NO: 42783 - DNA, 15 bp, Homo sapiens
cagcagtggcctgag

SEQ ID NO: 42784 - DNA, 15 bp, Homo sapiens
agcagtggcctgagg

SEQ ID NO: 42785 - DNA, 15 bp, Homo sapiens
gcagtggcctgaggg

SEQ ID NO: 42786 - DNA, 15 bp, Homo sapiens
cagtggcctgagggg

SEQ ID NO: 42787 - DNA, 15 bp, Homo sapiens
agtggcctgaggggt

SEQ ID NO: 42788 - DNA, 15 bp, Homo sapiens
gtggcctgaggggtc

SEQ ID NO: 42789 - DNA, 15 bp, Homo sapiens
tggcctgaggggtct

SEQ ID NO: 42790 - DNA, 15 bp, Homo sapiens
ggcctgaggggtctg

SEQ ID NO: 42791 - DNA, 15 bp, Homo sapiens
gcctgaggggtctga

SEQ ID NO: 42792 - DNA, 15 bp, Homo sapiens
cctgaggggtctgat

SEQ ID NO: 42793 - DNA, 15 bp, Homo sapiens
ctgaggggtctgatg

SEQ ID NO: 42794 - DNA, 15 bp, Homo sapiens
tgaggggtctgatgg

SEQ ID NO: 42795 - DNA, 15 bp, Homo sapiens
gaggggtctgatggg

SEQ ID NO: 42796 - DNA, 15 bp, Homo sapiens
aggggtctgatgggc

SEQ ID NO: 42797 - DNA, 15 bp, Homo sapiens
ggggtctgatgggcc

SEQ ID NO: 42798 - DNA, 15 bp, Homo sapiens
gggtctgatgggcct

SEQ ID NO: 42799 - DNA, 15 bp, Homo sapiens
ggtctgatgggcctt

SEQ ID NO: 42800 - DNA, 15 bp, Homo sapiens
gtctgatgggccttt

SEQ ID NO: 42801 - DNA, 15 bp, Homo sapiens
tctgatgggcctttc

SEQ ID NO: 42802 - DNA, 15 bp, Homo sapiens
ctgatgggcctttct

SEQ ID NO: 42803 - DNA, 15 bp, Homo sapiens
tgatgggcctttcta

SEQ ID NO: 42804 - DNA, 15 bp, Homo sapiens
gatgggcctttctag

SEQ ID NO: 42805 - DNA, 15 bp, Homo sapiens
atgggcctttctagc

SEQ ID NO: 42806 - DNA, 15 bp, Homo sapiens
tgggcctttctagct

SEQ ID NO: 42807 - DNA, 15 bp, Homo sapiens
gggcctttctagcta

SEQ ID NO: 42808 - DNA, 15 bp, Homo sapiens
ggcctttctagctat

SEQ ID NO: 42809 - DNA, 15 bp, Homo sapiens
gcctttctagctatg

SEQ ID NO: 42810 - DNA, 15 bp, Homo sapiens
cctttctagctatgt

SEQ ID NO: 42811 - DNA, 15 bp, Homo sapiens
ctttctagctatgtg

SEQ ID NO: 42812 - DNA, 15 bp, Homo sapiens
tttctagctatgtga

SEQ ID NO: 42813 - DNA, 15 bp, Homo sapiens
ttctagctatgtgat

SEQ ID NO: 42814 - DNA, 15 bp, Homo sapiens
tctagctatgtgatg

SEQ ID NO: 42815 - DNA, 15 bp, Homo sapiens
ctagctatgtgatgt

SEQ ID NO: 42816 - DNA, 15 bp, Homo sapiens
tagctatgtgatgtc

SEQ ID NO: 42817 - DNA, 15 bp, Homo sapiens
agctatgtgatgtct

SEQ ID NO: 42818 - DNA, 15 bp, Homo sapiens
gctatgtgatgtcta

SEQ ID NO: 42819 - DNA, 15 bp, Homo sapiens
ctatgtgatgtctag

SEQ ID NO: 42820 - DNA, 15 bp, Homo sapiens
tatgtgatgtctagg

SEQ ID NO: 42821 - DNA, 15 bp, Homo sapiens
atgtgatgtctaggc

SEQ ID NO: 42822 - DNA, 15 bp, Homo sapiens
tgtgatgtctaggca

SEQ ID NO: 42823 - DNA, 15 bp, Homo sapiens
gtgatgtctaggcat

SEQ ID NO: 42824 - DNA, 15 bp, Homo sapiens
tgatgtctaggcatg

SEQ ID NO: 42825 - DNA, 15 bp, Homo sapiens
gatgtctaggcatga

SEQ ID NO: 42826 - DNA, 15 bp, Homo sapiens
atgtctaggcatgaa

SEQ ID NO: 42827 - DNA, 15 bp, Homo sapiens
tgtctaggcatgaat

SEQ ID NO: 42828 - DNA, 15 bp, Homo sapiens
gtctaggcatgaata

SEQ ID NO: 42829 - DNA, 15 bp, Homo sapiens
tctaggcatgaatag

SEQ ID NO: 42830 - DNA, 15 bp, Homo sapiens
ctaggcatgaatagc

SEQ ID NO: 42831 - DNA, 15 bp, Homo sapiens
taggcatgaatagca

SEQ ID NO: 42832 - DNA, 15 bp, Homo sapiens
aggcatgaatagcac

SEQ ID NO: 42833 - DNA, 15 bp, Homo sapiens
ggcatgaatagcaca

SEQ ID NO: 42834 - DNA, 15 bp, Homo sapiens
gcatgaatagcacaa

SEQ ID NO: 42835 - DNA, 15 bp, Homo sapiens
catgaatagcacaat

SEQ ID NO: 42836 - DNA, 15 bp, Homo sapiens
atgaatagcacaata

SEQ ID NO: 42837 - DNA, 15 bp, Homo sapiens
tgaatagcacaataa

SEQ ID NO: 42838 - DNA, 15 bp, Homo sapiens
gaatagcacaataaa

SEQ ID NO: 42839 - DNA, 15 bp, Homo sapiens
aatagcacaataaaa

SEQ ID NO: 42840 - DNA, 15 bp, Homo sapiens
atagcacaataaaac

SEQ ID NO: 42841 - DNA, 15 bp, Homo sapiens
tagcacaataaaaca

SEQ ID NO: 42842 - DNA, 15 bp, Homo sapiens
agcacaataaaacag

SEQ ID NO: 42843 - DNA, 15 bp, Homo sapiens
gcacaataaaacagc

SEQ ID NO: 42844 - DNA, 15 bp, Homo sapiens
cacaataaaacagca

SEQ ID NO: 42845 - DNA, 15 bp, Homo sapiens
acaataaaacagcag

SEQ ID NO: 42846 - DNA, 15 bp, Homo sapiens
caataaaacagcagt

SEQ ID NO: 42847 - DNA, 15 bp, Homo sapiens
aataaaacagcagtt

SEQ ID NO: 42848 - DNA, 15 bp, Homo sapiens
ataaaacagcagttg

SEQ ID NO: 42849 - DNA, 15 bp, Homo sapiens
taaaacagcagttgg

SEQ ID NO: 42850 - DNA, 15 bp, Homo sapiens
aaaacagcagttggg

SEQ ID NO: 42851 - DNA, 15 bp, Homo sapiens
aaacagcagttgggg

SEQ ID NO: 42852 - DNA, 15 bp, Homo sapiens
aacagcagttgggga

SEQ ID NO: 42853 - DNA, 15 bp, Homo sapiens
acagcagttggggaa

SEQ ID NO: 42854 - DNA, 15 bp, Homo sapiens
cagcagttggggaac

SEQ ID NO: 42855 - DNA, 15 bp, Homo sapiens
agcagttggggaact

SEQ ID NO: 42856 - DNA, 15 bp, Homo sapiens
gcagttggggaacta

SEQ ID NO: 42857 - DNA, 15 bp, Homo sapiens
cagttggggaactat

SEQ ID NO: 42858 - DNA, 15 bp, Homo sapiens
agttggggaactata

SEQ ID NO: 42859 - DNA, 15 bp, Homo sapiens
gttggggaactataa

SEQ ID NO: 42860 - DNA, 15 bp, Homo sapiens
ttggggaactataag

SEQ ID NO: 42861 - DNA, 15 bp, Homo sapiens
tggggaactataagg

SEQ ID NO: 42862 - DNA, 15 bp, Homo sapiens
ggggaactataagga

SEQ ID NO: 42863 - DNA, 15 bp, Homo sapiens
gggaactataaggag

SEQ ID NO: 42864 - DNA, 15 bp, Homo sapiens
ggaactataaggagc

SEQ ID NO: 42865 - DNA, 15 bp, Homo sapiens
gaactataaggagcc

SEQ ID NO: 42866 - DNA, 15 bp, Homo sapiens
aactataaggagcct

SEQ ID NO: 42867 - DNA, 15 bp, Homo sapiens
actataaggagcctt

SEQ ID NO: 42868 - DNA, 15 bp, Homo sapiens
ctataaggagccttt

SEQ ID NO: 42869 - DNA, 15 bp, Homo sapiens
tataaggagccttta

SEQ ID NO: 42870 - DNA, 15 bp, Homo sapiens
ataaggagcctttaa

SEQ ID NO: 42871 - DNA, 15 bp, Homo sapiens
taaggagcctttaaa

SEQ ID NO: 42872 - DNA, 15 bp, Homo sapiens
aaggagcctttaaat

SEQ ID NO: 42873 - DNA, 15 bp, Homo sapiens
aggagcctttaaatt

SEQ ID NO: 42874 - DNA, 15 bp, Homo sapiens
ggagcctttaaattg

SEQ ID NO: 42875 - DNA, 15 bp, Homo sapiens
gagcctttaaattga

SEQ ID NO: 42876 - DNA, 15 bp, Homo sapiens
agcctttaaattgac

SEQ ID NO: 42877 - DNA, 15 bp, Homo sapiens
gcctttaaattgact

SEQ ID NO: 42878 - DNA, 15 bp, Homo sapiens
cctttaaattgactt

SEQ ID NO: 42879 - DNA, 15 bp, Homo sapiens
ctttaaattgacttt

SEQ ID NO: 42880 - DNA, 15 bp, Homo sapiens
tttaaattgactttt

SEQ ID NO: 42881 - DNA, 15 bp, Homo sapiens
ttaaattgacttttt

SEQ ID NO: 42882 - DNA, 15 bp, Homo sapiens
taaattgactttttt

SEQ ID NO: 42883 - DNA, 15 bp, Homo sapiens
aaattgacttttttt

SEQ ID NO: 42884 - DNA, 15 bp, Homo sapiens
aattgactttttttt

SEQ ID NO: 42885 - DNA, 15 bp, Homo sapiens
attgacttttttttt

SEQ ID NO: 42886 - DNA, 15 bp, Homo sapiens
ttgactttttttttc

SEQ ID NO: 42887 - DNA, 15 bp, Homo sapiens
tgactttttttttcc

SEQ ID NO: 42888 - DNA, 15 bp, Homo sapiens
gactttttttttcct

SEQ ID NO: 42889 - DNA, 15 bp, Homo sapiens
actttttttttcctc

SEQ ID NO: 42890 - DNA, 15 bp, Homo sapiens
ctttttttttcctct

SEQ ID NO: 42891 - DNA, 15 bp, Homo sapiens
tttttttttcctctt

SEQ ID NO: 42892 - DNA, 15 bp, Homo sapiens
ttttttttcctcttc

SEQ ID NO: 42893 - DNA, 15 bp, Homo sapiens
tttttttcctcttcc

SEQ ID NO: 42894 - DNA, 15 bp, Homo sapiens
ttttttcctcttccc

SEQ ID NO: 42895 - DNA, 15 bp, Homo sapiens
tttttcctcttccca

SEQ ID NO: 42896 - DNA, 15 bp, Homo sapiens
ttttcctcttcccac

SEQ ID NO: 42897 - DNA, 15 bp, Homo sapiens
tttcctcttcccaca

SEQ ID NO: 42898 - DNA, 15 bp, Homo sapiens
ttcctcttcccacag

SEQ ID NO: 42899 - DNA, 15 bp, Homo sapiens
tcctcttcccacaga

SEQ ID NO: 42900 - DNA, 15 bp, Homo sapiens
cctcttcccacagag

SEQ ID NO: 42901 - DNA, 15 bp, Homo sapiens
ctcttcccacagaga

SEQ ID NO: 42902 - DNA, 15 bp, Homo sapiens
tcttcccacagagat

SEQ ID NO: 42903 - DNA, 15 bp, Homo sapiens
cttcccacagagata

SEQ ID NO: 42904 - DNA, 15 bp, Homo sapiens
ttcccacagagatac

SEQ ID NO: 42905 - DNA, 15 bp, Homo sapiens
tcccacagagatact

SEQ ID NO: 42906 - DNA, 15 bp, Homo sapiens
cccacagagatactc

SEQ ID NO: 42907 - DNA, 15 bp, Homo sapiens
ccacagagatactct

SEQ ID NO: 42908 - DNA, 15 bp, Homo sapiens
cacagagatactcta

SEQ ID NO: 42909 - DNA, 15 bp, Homo sapiens
acagagatactctat

SEQ ID NO: 42910 - DNA, 15 bp, Homo sapiens
cagagatactctatt

SEQ ID NO: 42911 - DNA, 15 bp, Homo sapiens
agagatactctatta

SEQ ID NO: 42912 - DNA, 15 bp, Homo sapiens
gagatactctattat

SEQ ID NO: 42913 - DNA, 15 bp, Homo sapiens
agatactctattata

SEQ ID NO: 42914 - DNA, 15 bp, Homo sapiens
gatactctattatag

SEQ ID NO: 42915 - DNA, 15 bp, Homo sapiens
atactctattatagc

SEQ ID NO: 42916 - DNA, 15 bp, Homo sapiens
tactctattatagca

SEQ ID NO: 42917 - DNA, 15 bp, Homo sapiens
actctattatagcaa

SEQ ID NO: 42918 - DNA, 15 bp, Homo sapiens
ctctattatagcaaa

SEQ ID NO: 42919 - DNA, 15 bp, Homo sapiens
tctattatagcaaag

SEQ ID NO: 42920 - DNA, 15 bp, Homo sapiens
ctattatagcaaaga

SEQ ID NO: 42921 - DNA, 15 bp, Homo sapiens
tattatagcaaagaa

SEQ ID NO: 42922 - DNA, 15 bp, Homo sapiens
attatagcaaagaag

SEQ ID NO: 42923 - DNA, 15 bp, Homo sapiens
ttatagcaaagaaga

SEQ ID NO: 42924 - DNA, 15 bp, Homo sapiens
tatagcaaagaagaa

SEQ ID NO: 42925 - DNA, 15 bp, Homo sapiens
atagcaaagaagaaa

SEQ ID NO: 42926 - DNA, 15 bp, Homo sapiens
tagcaaagaagaaag

SEQ ID NO: 42927 - DNA, 15 bp, Homo sapiens
agcaaagaagaaaga

SEQ ID NO: 42928 - DNA, 15 bp, Homo sapiens
gcaaagaagaaagat

SEQ ID NO: 42929 - DNA, 15 bp, Homo sapiens
caaagaagaaagata

SEQ ID NO: 42930 - DNA, 15 bp, Homo sapiens
aaagaagaaagataa

SEQ ID NO: 42931 - DNA, 15 bp, Homo sapiens
aagaagaaagataat

SEQ ID NO: 42932 - DNA, 15 bp, Homo sapiens
agaagaaagataatt

SEQ ID NO: 42933 - DNA, 15 bp, Homo sapiens
gaagaaagataattt

SEQ ID NO: 42934 - DNA, 15 bp, Homo sapiens
aagaaagataatttc

SEQ ID NO: 42935 - DNA, 15 bp, Homo sapiens
agaaagataatttca

SEQ ID NO: 42936 - DNA, 15 bp, Homo sapiens
gaaagataatttcat

SEQ ID NO: 42937 - DNA, 15 bp, Homo sapiens
aaagataatttcatt

SEQ ID NO: 42938 - DNA, 15 bp, Homo sapiens
aagataatttcattg

SEQ ID NO: 42939 - DNA, 15 bp, Homo sapiens
agataatttcattga

SEQ ID NO: 42940 - DNA, 15 bp, Homo sapiens
gataatttcattgag

SEQ ID NO: 42941 - DNA, 15 bp, Homo sapiens
ataatttcattgagc

SEQ ID NO: 42942 - DNA, 15 bp, Homo sapiens
taatttcattgagcc

SEQ ID NO: 42943 - DNA, 15 bp, Homo sapiens
aatttcattgagcca

SEQ ID NO: 42944 - DNA, 15 bp, Homo sapiens
atttcattgagccat

SEQ ID NO: 42945 - DNA, 15 bp, Homo sapiens
tttcattgagccatc

SEQ ID NO: 42946 - DNA, 15 bp, Homo sapiens
ttcattgagccatcc

SEQ ID NO: 42947 - DNA, 15 bp, Homo sapiens
tcattgagccatcct

SEQ ID NO: 42948 - DNA, 15 bp, Homo sapiens
cattgagccatcctg

SEQ ID NO: 42949 - DNA, 15 bp, Homo sapiens
attgagccatcctgt

SEQ ID NO: 42950 - DNA, 15 bp, Homo sapiens
ttgagccatcctgtt

SEQ ID NO: 42951 - DNA, 15 bp, Homo sapiens
tgagccatcctgttt

SEQ ID NO: 42952 - DNA, 15 bp, Homo sapiens
gagccatcctgtttt

SEQ ID NO: 42953 - DNA, 15 bp, Homo sapiens
agccatcctgtttta

SEQ ID NO: 42954 - DNA, 15 bp, Homo sapiens
gccatcctgttttac

SEQ ID NO: 42955 - DNA, 15 bp, Homo sapiens
ccatcctgttttaca

SEQ ID NO: 42956 - DNA, 15 bp, Homo sapiens
catcctgttttacag

SEQ ID NO: 42957 - DNA, 15 bp, Homo sapiens
atcctgttttacagg

SEQ ID NO: 42958 - DNA, 15 bp, Homo sapiens
tcctgttttacaggt

SEQ ID NO: 42959 - DNA, 15 bp, Homo sapiens
cctgttttacaggta

SEQ ID NO: 42960 - DNA, 15 bp, Homo sapiens
ctgttttacaggtaa

SEQ ID NO: 42961 - DNA, 15 bp, Homo sapiens
tgttttacaggtaag

SEQ ID NO: 42962 - DNA, 15 bp, Homo sapiens
gttttacaggtaagg

SEQ ID NO: 42963 - DNA, 15 bp, Homo sapiens
ttttacaggtaagga

SEQ ID NO: 42964 - DNA, 15 bp, Homo sapiens
tttacaggtaaggaa

SEQ ID NO: 42965 - DNA, 15 bp, Homo sapiens
ttacaggtaaggaaa

SEQ ID NO: 42966 - DNA, 15 bp, Homo sapiens
tacaggtaaggaaac

SEQ ID NO: 42967 - DNA, 15 bp, Homo sapiens
acaggtaaggaaacc

SEQ ID NO: 42968 - DNA, 15 bp, Homo sapiens
caggtaaggaaacca

SEQ ID NO: 42969 - DNA, 15 bp, Homo sapiens
aggtaaggaaaccaa

SEQ ID NO: 42970 - DNA, 15 bp, Homo sapiens
ggtaaggaaaccaaa

SEQ ID NO: 42971 - DNA, 15 bp, Homo sapiens
gtaaggaaaccaaag

SEQ ID NO: 42972 - DNA, 15 bp, Homo sapiens
taaggaaaccaaagg

SEQ ID NO: 42973 - DNA, 15 bp, Homo sapiens
aaggaaaccaaaggc

SEQ ID NO: 42974 - DNA, 15 bp, Homo sapiens
aggaaaccaaaggcc

SEQ ID NO: 42975 - DNA, 15 bp, Homo sapiens
ggaaaccaaaggcca

SEQ ID NO: 42976 - DNA, 15 bp, Homo sapiens
gaaaccaaaggccat

SEQ ID NO: 42977 - DNA, 15 bp, Homo sapiens
aaaccaaaggccata

SEQ ID NO: 42978 - DNA, 15 bp, Homo sapiens
aaccaaaggccatag

SEQ ID NO: 42979 - DNA, 15 bp, Homo sapiens
accaaaggccataga

SEQ ID NO: 42980 - DNA, 15 bp, Homo sapiens
ccaaaggccatagaa

SEQ ID NO: 42981 - DNA, 15 bp, Homo sapiens
caaaggccatagaag

SEQ ID NO: 42982 - DNA, 15 bp, Homo sapiens
aaaggccatagaaga

SEQ ID NO: 42983 - DNA, 15 bp, Homo sapiens
aaggccatagaagac

SEQ ID NO: 42984 - DNA, 15 bp, Homo sapiens
aggccatagaagact

SEQ ID NO: 42985 - DNA, 15 bp, Homo sapiens
ggccatagaagactt

SEQ ID NO: 42986 - DNA, 15 bp, Homo sapiens
gccatagaagacttg

SEQ ID NO: 42987 - DNA, 15 bp, Homo sapiens
ccatagaagacttgc

SEQ ID NO: 42988 - DNA, 15 bp, Homo sapiens
catagaagacttgcc

SEQ ID NO: 42989 - DNA, 15 bp, Homo sapiens
atagaagacttgcct

SEQ ID NO: 42990 - DNA, 15 bp, Homo sapiens
tagaagacttgcctt

SEQ ID NO: 42991 - DNA, 15 bp, Homo sapiens
agaagacttgcctta

SEQ ID NO: 42992 - DNA, 15 bp, Homo sapiens
gaagacttgccttat

SEQ ID NO: 42993 - DNA, 15 bp, Homo sapiens
aagacttgccttatg

SEQ ID NO: 42994 - DNA, 15 bp, Homo sapiens
agacttgccttatgt

SEQ ID NO: 42995 - DNA, 15 bp, Homo sapiens
gacttgccttatgtc

SEQ ID NO: 42996 - DNA, 15 bp, Homo sapiens
acttgccttatgtca

SEQ ID NO: 42997 - DNA, 15 bp, Homo sapiens
cttgccttatgtcat

SEQ ID NO: 42998 - DNA, 15 bp, Homo sapiens
ttgccttatgtcatg

SEQ ID NO: 42999 - DNA, 15 bp, Homo sapiens
tgccttatgtcatga

SEQ ID NO: 43000 - DNA, 15 bp, Homo sapiens
gccttatgtcatgaa

SEQ ID NO: 43001 - DNA, 15 bp, Homo sapiens
ccttatgtcatgaag

SEQ ID NO: 43002 - DNA, 15 bp, Homo sapiens
cttatgtcatgaaga

SEQ ID NO: 43003 - DNA, 15 bp, Homo sapiens
ttatgtcatgaagaa

SEQ ID NO: 43004 - DNA, 15 bp, Homo sapiens
tatgtcatgaagaaa

SEQ ID NO: 43005 - DNA, 15 bp, Homo sapiens
atgtcatgaagaaag

SEQ ID NO: 43006 - DNA, 15 bp, Homo sapiens
tgtcatgaagaaagt

SEQ ID NO: 43007 - DNA, 15 bp, Homo sapiens
gtcatgaagaaagtt

SEQ ID NO: 43008 - DNA, 15 bp, Homo sapiens
tcatgaagaaagttt

SEQ ID NO: 43009 - DNA, 15 bp, Homo sapiens
catgaagaaagttta

SEQ ID NO: 43010 - DNA, 15 bp, Homo sapiens
atgaagaaagtttat

SEQ ID NO: 43011 - DNA, 15 bp, Homo sapiens
tgaagaaagtttatg

SEQ ID NO: 43012 - DNA, 15 bp, Homo sapiens
gaagaaagtttatgt

SEQ ID NO: 43013 - DNA, 15 bp, Homo sapiens
aagaaagtttatgtt

SEQ ID NO: 43014 - DNA, 15 bp, Homo sapiens
agaaagtttatgtta

SEQ ID NO: 43015 - DNA, 15 bp, Homo sapiens
gaaagtttatgttag

SEQ ID NO: 43016 - DNA, 15 bp, Homo sapiens
aaagtttatgttaga

SEQ ID NO: 43017 - DNA, 15 bp, Homo sapiens
aagtttatgttagaa

SEQ ID NO: 43018 - DNA, 15 bp, Homo sapiens
agtttatgttagaac

SEQ ID NO: 43019 - DNA, 15 bp, Homo sapiens
gtttatgttagaact

SEQ ID NO: 43020 - DNA, 15 bp, Homo sapiens
tttatgttagaactc

SEQ ID NO: 43021 - DNA, 15 bp, Homo sapiens
ttatgttagaactca

SEQ ID NO: 43022 - DNA, 15 bp, Homo sapiens
tatgttagaactcag

SEQ ID NO: 43023 - DNA, 15 bp, Homo sapiens
atgttagaactcagg

SEQ ID NO: 43024 - DNA, 15 bp, Homo sapiens
tgttagaactcaggg

SEQ ID NO: 43025 - DNA, 15 bp, Homo sapiens
gttagaactcagggc

SEQ ID NO: 43026 - DNA, 15 bp, Homo sapiens
ttagaactcagggct

SEQ ID NO: 43027 - DNA, 15 bp, Homo sapiens
tagaactcagggctc

SEQ ID NO: 43028 - DNA, 15 bp, Homo sapiens
agaactcagggctcc

SEQ ID NO: 43029 - DNA, 15 bp, Homo sapiens
gaactcagggctccc

SEQ ID NO: 43030 - DNA, 15 bp, Homo sapiens
aactcagggctccca

SEQ ID NO: 43031 - DNA, 15 bp, Homo sapiens
actcagggctcccaa

SEQ ID NO: 43032 - DNA, 15 bp, Homo sapiens
ctcagggctcccaat

SEQ ID NO: 43033 - DNA, 15 bp, Homo sapiens
tcagggctcccaatt

SEQ ID NO: 43034 - DNA, 15 bp, Homo sapiens
cagggctcccaattc

SEQ ID NO: 43035 - DNA, 15 bp, Homo sapiens
agggctcccaattcc

SEQ ID NO: 43036 - DNA, 15 bp, Homo sapiens
gggctcccaattcca

SEQ ID NO: 43037 - DNA, 15 bp, Homo sapiens
ggctcccaattccac

SEQ ID NO: 43038 - DNA, 15 bp, Homo sapiens
gctcccaattccact

SEQ ID NO: 43039 - DNA, 15 bp, Homo sapiens
ctcccaattccactg

SEQ ID NO: 43040 - DNA, 15 bp, Homo sapiens
tcccaattccactgt

SEQ ID NO: 43041 - DNA, 15 bp, Homo sapiens
cccaattccactgtt

SEQ ID NO: 43042 - DNA, 15 bp, Homo sapiens
ccaattccactgttc

SEQ ID NO: 43043 - DNA, 15 bp, Homo sapiens
caattccactgttct

SEQ ID NO: 43044 - DNA, 15 bp, Homo sapiens
aattccactgttctt

SEQ ID NO: 43045 - DNA, 15 bp, Homo sapiens
attccactgttcttt

SEQ ID NO: 43046 - DNA, 15 bp, Homo sapiens
ttccactgttcttta

SEQ ID NO: 43047 - DNA, 15 bp, Homo sapiens
tccactgttctttat

SEQ ID NO: 43048 - DNA, 15 bp, Homo sapiens
ccactgttctttatt

SEQ ID NO: 43049 - DNA, 15 bp, Homo sapiens
cactgttctttattc

SEQ ID NO: 43050 - DNA, 15 bp, Homo sapiens
actgttctttattct

SEQ ID NO: 43051 - DNA, 15 bp, Homo sapiens
ctgttctttattcta

SEQ ID NO: 43052 - DNA, 15 bp, Homo sapiens
tgttctttattctac

SEQ ID NO: 43053 - DNA, 15 bp, Homo sapiens
gttctttattctaca

SEQ ID NO: 43054 - DNA, 15 bp, Homo sapiens
ttctttattctacac

SEQ ID NO: 43055 - DNA, 15 bp, Homo sapiens
tctttattctacacc

SEQ ID NO: 43056 - DNA, 15 bp, Homo sapiens
ctttattctacacct

SEQ ID NO: 43057 - DNA, 15 bp, Homo sapiens
tttattctacacctg

SEQ ID NO: 43058 - DNA, 15 bp, Homo sapiens
ttattctacacctgg

SEQ ID NO: 43059 - DNA, 15 bp, Homo sapiens
tattctacacctggg

SEQ ID NO: 43060 - DNA, 15 bp, Homo sapiens
attctacacctgggt

SEQ ID NO: 43061 - DNA, 15 bp, Homo sapiens
ttctacacctgggtg

SEQ ID NO: 43062 - DNA, 15 bp, Homo sapiens
tctacacctgggtgg

SEQ ID NO: 43063 - DNA, 15 bp, Homo sapiens
ctacacctgggtggt

SEQ ID NO: 43064 - DNA, 15 bp, Homo sapiens
tacacctgggtggtc

SEQ ID NO: 43065 - DNA, 15 bp, Homo sapiens
acacctgggtggtca

SEQ ID NO: 43066 - DNA, 15 bp, Homo sapiens
cacctgggtggtcac

SEQ ID NO: 43067 - DNA, 15 bp, Homo sapiens
acctgggtggtcaca

SEQ ID NO: 43068 - DNA, 15 bp, Homo sapiens
cctgggtggtcacaa

SEQ ID NO: 43069 - DNA, 15 bp, Homo sapiens
ctgggtggtcacaac

SEQ ID NO: 43070 - DNA, 15 bp, Homo sapiens
tgggtggtcacaact

SEQ ID NO: 43071 - DNA, 15 bp, Homo sapiens
gggtggtcacaactg

SEQ ID NO: 43072 - DNA, 15 bp, Homo sapiens
ggtggtcacaactga

SEQ ID NO: 43073 - DNA, 15 bp, Homo sapiens
gtggtcacaactgaa

SEQ ID NO: 43074 - DNA, 15 bp, Homo sapiens
tggtcacaactgaaa

SEQ ID NO: 43075 - DNA, 15 bp, Homo sapiens
ggtcacaactgaaaa

SEQ ID NO: 43076 - DNA, 15 bp, Homo sapiens
gtcacaactgaaaat

SEQ ID NO: 43077 - DNA, 15 bp, Homo sapiens
tcacaactgaaaatg

SEQ ID NO: 43078 - DNA, 15 bp, Homo sapiens
cacaactgaaaatgt

SEQ ID NO: 43079 - DNA, 15 bp, Homo sapiens
acaactgaaaatgtt

SEQ ID NO: 43080 - DNA, 15 bp, Homo sapiens
caactgaaaatgttt

SEQ ID NO: 43081 - DNA, 15 bp, Homo sapiens
aactgaaaatgtttt

SEQ ID NO: 43082 - DNA, 15 bp, Homo sapiens
actgaaaatgttttg

SEQ ID NO: 43083 - DNA, 15 bp, Homo sapiens
ctgaaaatgttttgc

SEQ ID NO: 43084 - DNA, 15 bp, Homo sapiens
tgaaaatgttttgct

SEQ ID NO: 43085 - DNA, 15 bp, Homo sapiens
gaaaatgttttgctt

SEQ ID NO: 43086 - DNA, 15 bp, Homo sapiens
aaaatgttttgctta

SEQ ID NO: 43087 - DNA, 15 bp, Homo sapiens
aaatgttttgcttat

SEQ ID NO: 43088 - DNA, 15 bp, Homo sapiens
aatgttttgcttatt

SEQ ID NO: 43089 - DNA, 15 bp, Homo sapiens
atgttttgcttattt

SEQ ID NO: 43090 - DNA, 15 bp, Homo sapiens
tgttttgcttatttc

SEQ ID NO: 43091 - DNA, 15 bp, Homo sapiens
gttttgcttatttct

SEQ ID NO: 43092 - DNA, 15 bp, Homo sapiens
ttttgcttatttcta

SEQ ID NO: 43093 - DNA, 15 bp, Homo sapiens
tttgcttatttctaa

SEQ ID NO: 43094 - DNA, 15 bp, Homo sapiens
ttgcttatttctaaa

SEQ ID NO: 43095 - DNA, 15 bp, Homo sapiens
tgcttatttctaaac

SEQ ID NO: 43096 - DNA, 15 bp, Homo sapiens
gcttatttctaaaca

SEQ ID NO: 43097 - DNA, 15 bp, Homo sapiens
cttatttctaaacag

SEQ ID NO: 43098 - DNA, 15 bp, Homo sapiens
ttatttctaaacaga

SEQ ID NO: 43099 - DNA, 15 bp, Homo sapiens
tatttctaaacagaa

SEQ ID NO: 43100 - DNA, 15 bp, Homo sapiens
atttctaaacagaaa

SEQ ID NO: 43101 - DNA, 15 bp, Homo sapiens
tttctaaacagaaat

SEQ ID NO: 43102 - DNA, 15 bp, Homo sapiens
ttctaaacagaaatc

SEQ ID NO: 43103 - DNA, 15 bp, Homo sapiens
tctaaacagaaatca

SEQ ID NO: 43104 - DNA, 15 bp, Homo sapiens
ctaaacagaaatcat

SEQ ID NO: 43105 - DNA, 15 bp, Homo sapiens
taaacagaaatcatt

SEQ ID NO: 43106 - DNA, 15 bp, Homo sapiens
aaacagaaatcattt

SEQ ID NO: 43107 - DNA, 15 bp, Homo sapiens
aacagaaatcatttt

SEQ ID NO: 43108 - DNA, 15 bp, Homo sapiens
acagaaatcattttt

SEQ ID NO: 43109 - DNA, 15 bp, Homo sapiens
cagaaatcatttttt

SEQ ID NO: 43110 - DNA, 15 bp, Homo sapiens
agaaatcattttttg

SEQ ID NO: 43111 - DNA, 15 bp, Homo sapiens
gaaatcattttttga

SEQ ID NO: 43112 - DNA, 15 bp, Homo sapiens
aaatcattttttgac

SEQ ID NO: 43113 - DNA, 15 bp, Homo sapiens
aatcattttttgaca

SEQ ID NO: 43114 - DNA, 15 bp, Homo sapiens
atcattttttgacat

SEQ ID NO: 43115 - DNA, 15 bp, Homo sapiens
tcattttttgacatg

SEQ ID NO: 43116 - DNA, 15 bp, Homo sapiens
cattttttgacatgt

SEQ ID NO: 43117 - DNA, 15 bp, Homo sapiens
attttttgacatgtt

SEQ ID NO: 43118 - DNA, 15 bp, Homo sapiens
ttttttgacatgttc

SEQ ID NO: 43119 - DNA, 15 bp, Homo sapiens
tttttgacatgttca

SEQ ID NO: 43120 - DNA, 15 bp, Homo sapiens
ttttgacatgttcat

SEQ ID NO: 43121 - DNA, 15 bp, Homo sapiens
tttgacatgttcatt

SEQ ID NO: 43122 - DNA, 15 bp, Homo sapiens
ttgacatgttcattt

SEQ ID NO: 43123 - DNA, 15 bp, Homo sapiens
tgacatgttcatttt

SEQ ID NO: 43124 - DNA, 15 bp, Homo sapiens
gacatgttcatttta

SEQ ID NO: 43125 - DNA, 15 bp, Homo sapiens
acatgttcattttaa

SEQ ID NO: 43126 - DNA, 15 bp, Homo sapiens
catgttcattttaat

SEQ ID NO: 43127 - DNA, 15 bp, Homo sapiens
atgttcattttaatg

SEQ ID NO: 43128 - DNA, 15 bp, Homo sapiens
tgttcattttaatga

SEQ ID NO: 43129 - DNA, 15 bp, Homo sapiens
gttcattttaatgat

SEQ ID NO: 43130 - DNA, 15 bp, Homo sapiens
ttcattttaatgatg

SEQ ID NO: 43131 - DNA, 15 bp, Homo sapiens
tcattttaatgatgt

SEQ ID NO: 43132 - DNA, 15 bp, Homo sapiens
cattttaatgatgtg

SEQ ID NO: 43133 - DNA, 15 bp, Homo sapiens
attttaatgatgtgt

SEQ ID NO: 43134 - DNA, 15 bp, Homo sapiens
ttttaatgatgtgtc

SEQ ID NO: 43135 - DNA, 15 bp, Homo sapiens
tttaatgatgtgtct

SEQ ID NO: 43136 - DNA, 15 bp, Homo sapiens
ttaatgatgtgtcta

SEQ ID NO: 43137 - DNA, 15 bp, Homo sapiens
taatgatgtgtctat

SEQ ID NO: 43138 - DNA, 15 bp, Homo sapiens
aatgatgtgtctatg

SEQ ID NO: 43139 - DNA, 15 bp, Homo sapiens
atgatgtgtctatgc

SEQ ID NO: 43140 - DNA, 15 bp, Homo sapiens
tgatgtgtctatgcc

SEQ ID NO: 43141 - DNA, 15 bp, Homo sapiens
gatgtgtctatgcct

SEQ ID NO: 43142 - DNA, 15 bp, Homo sapiens
atgtgtctatgcctg

SEQ ID NO: 43143 - DNA, 15 bp, Homo sapiens
tgtgtctatgcctgg

SEQ ID NO: 43144 - DNA, 15 bp, Homo sapiens
gtgtctatgcctggg

SEQ ID NO: 43145 - DNA, 15 bp, Homo sapiens
tgtctatgcctgggg

SEQ ID NO: 43146 - DNA, 15 bp, Homo sapiens
gtctatgcctggggc

SEQ ID NO: 43147 - DNA, 15 bp, Homo sapiens
tctatgcctggggct

SEQ ID NO: 43148 - DNA, 15 bp, Homo sapiens
ctatgcctggggcta

SEQ ID NO: 43149 - DNA, 15 bp, Homo sapiens
tatgcctggggctaa

SEQ ID NO: 43150 - DNA, 15 bp, Homo sapiens
atgcctggggctaat

SEQ ID NO: 43151 - DNA, 15 bp, Homo sapiens
tgcctggggctaatg

SEQ ID NO: 43152 - DNA, 15 bp, Homo sapiens
gcctggggctaatgt

SEQ ID NO: 43153 - DNA, 15 bp, Homo sapiens
cctggggctaatgtc

SEQ ID NO: 43154 - DNA, 15 bp, Homo sapiens
ctggggctaatgtca

SEQ ID NO: 43155 - DNA, 15 bp, Homo sapiens
tggggctaatgtcat

SEQ ID NO: 43156 - DNA, 15 bp, Homo sapiens
ggggctaatgtcatg

SEQ ID NO: 43157 - DNA, 15 bp, Homo sapiens
gggctaatgtcatga

SEQ ID NO: 43158 - DNA, 15 bp, Homo sapiens
ggctaatgtcatgaa

SEQ ID NO: 43159 - DNA, 15 bp, Homo sapiens
gctaatgtcatgaaa

SEQ ID NO: 43160 - DNA, 15 bp, Homo sapiens
ctaatgtcatgaaaa

SEQ ID NO: 43161 - DNA, 15 bp, Homo sapiens
taatgtcatgaaaac

SEQ ID NO: 43162 - DNA, 15 bp, Homo sapiens
aatgtcatgaaaaca

SEQ ID NO: 43163 - DNA, 15 bp, Homo sapiens
atgtcatgaaaacaa

SEQ ID NO: 43164 - DNA, 15 bp, Homo sapiens
tgtcatgaaaacaat

SEQ ID NO: 43165 - DNA, 15 bp, Homo sapiens
gtcatgaaaacaatg

SEQ ID NO: 43166 - DNA, 15 bp, Homo sapiens
tcatgaaaacaatgt

SEQ ID NO: 43167 - DNA, 15 bp, Homo sapiens
catgaaaacaatgtg

SEQ ID NO: 43168 - DNA, 15 bp, Homo sapiens
atgaaaacaatgtgt

SEQ ID NO: 43169 - DNA, 15 bp, Homo sapiens
tgaaaacaatgtgtc

SEQ ID NO: 43170 - DNA, 15 bp, Homo sapiens
gaaaacaatgtgtct

SEQ ID NO: 43171 - DNA, 15 bp, Homo sapiens
aaaacaatgtgtctg

SEQ ID NO: 43172 - DNA, 15 bp, Homo sapiens
aaacaatgtgtctgg

SEQ ID NO: 43173 - DNA, 15 bp, Homo sapiens
aacaatgtgtctggt

SEQ ID NO: 43174 - DNA, 15 bp, Homo sapiens
acaatgtgtctggta

SEQ ID NO: 43175 - DNA, 15 bp, Homo sapiens
caatgtgtctggtaa

SEQ ID NO: 43176 - DNA, 15 bp, Homo sapiens
aatgtgtctggtaag

SEQ ID NO: 43177 - DNA, 15 bp, Homo sapiens
atgtgtctggtaagg

SEQ ID NO: 43178 - DNA, 15 bp, Homo sapiens
tgtgtctggtaagga

SEQ ID NO: 43179 - DNA, 15 bp, Homo sapiens
gtgtctggtaaggag

SEQ ID NO: 43180 - DNA, 15 bp, Homo sapiens
tgtctggtaaggaga

SEQ ID NO: 43181 - DNA, 15 bp, Homo sapiens
gtctggtaaggagaa

SEQ ID NO: 43182 - DNA, 15 bp, Homo sapiens
tctggtaaggagaaa

SEQ ID NO: 43183 - DNA, 15 bp, Homo sapiens
ctggtaaggagaaaa

SEQ ID NO: 43184 - DNA, 15 bp, Homo sapiens
tggtaaggagaaaac

SEQ ID NO: 43185 - DNA, 15 bp, Homo sapiens
ggtaaggagaaaact

SEQ ID NO: 43186 - DNA, 15 bp, Homo sapiens
gtaaggagaaaactg

SEQ ID NO: 43187 - DNA, 15 bp, Homo sapiens
taaggagaaaactga

SEQ ID NO: 43188 - DNA, 15 bp, Homo sapiens
aaggagaaaactgaa

SEQ ID NO: 43189 - DNA, 15 bp, Homo sapiens
aggagaaaactgaaa

SEQ ID NO: 43190 - DNA, 15 bp, Homo sapiens
ggagaaaactgaaaa

SEQ ID NO: 43191 - DNA, 15 bp, Homo sapiens
gagaaaactgaaaaa

SEQ ID NO: 43192 - DNA, 15 bp, Homo sapiens
agaaaactgaaaaag

SEQ ID NO: 43193 - DNA, 15 bp, Homo sapiens
gaaaactgaaaaagt

SEQ ID NO: 43194 - DNA, 15 bp, Homo sapiens
aaaactgaaaaagtc

SEQ ID NO: 43195 - DNA, 15 bp, Homo sapiens
aaactgaaaaagtca

SEQ ID NO: 43196 - DNA, 15 bp, Homo sapiens
aactgaaaaagtcag

SEQ ID NO: 43197 - DNA, 15 bp, Homo sapiens
actgaaaaagtcagc

SEQ ID NO: 43198 - DNA, 15 bp, Homo sapiens
ctgaaaaagtcagca

SEQ ID NO: 43199 - DNA, 15 bp, Homo sapiens
tgaaaaagtcagcat

SEQ ID NO: 43200 - DNA, 15 bp, Homo sapiens
gaaaaagtcagcatt

SEQ ID NO: 43201 - DNA, 15 bp, Homo sapiens
aaaaagtcagcatta

SEQ ID NO: 43202 - DNA, 15 bp, Homo sapiens
aaaagtcagcattaa

SEQ ID NO: 43203 - DNA, 15 bp, Homo sapiens
aaagtcagcattaaa

SEQ ID NO: 43204 - DNA, 15 bp, Homo sapiens
aagtcagcattaaaa

SEQ ID NO: 43205 - DNA, 15 bp, Homo sapiens
agtcagcattaaaaa

SEQ ID NO: 43206 - DNA, 15 bp, Homo sapiens
gtcagcattaaaaag

SEQ ID NO: 43207 - DNA, 15 bp, Homo sapiens
tcagcattaaaaaga

SEQ ID NO: 43208 - DNA, 15 bp, Homo sapiens
cagcattaaaaagac

SEQ ID NO: 43209 - DNA, 15 bp, Homo sapiens
agcattaaaaagaca

SEQ ID NO: 43210 - DNA, 15 bp, Homo sapiens
gcattaaaaagacat

SEQ ID NO: 43211 - DNA, 15 bp, Homo sapiens
cattaaaaagacatt

SEQ ID NO: 43212 - DNA, 15 bp, Homo sapiens
attaaaaagacattt

SEQ ID NO: 43213 - DNA, 15 bp, Homo sapiens
ttaaaaagacattta

SEQ ID NO: 43214 - DNA, 15 bp, Homo sapiens
taaaaagacatttaa

SEQ ID NO: 43215 - DNA, 15 bp, Homo sapiens
aaaaagacatttaag

SEQ ID NO: 43216 - DNA, 15 bp, Homo sapiens
aaaagacatttaagt

SEQ ID NO: 43217 - DNA, 15 bp, Homo sapiens
aaagacatttaagtc

SEQ ID NO: 43218 - DNA, 15 bp, Homo sapiens
aagacatttaagtcc

SEQ ID NO: 43219 - DNA, 15 bp, Homo sapiens
agacatttaagtcca

SEQ ID NO: 43220 - DNA, 15 bp, Homo sapiens
gacatttaagtccat

SEQ ID NO: 43221 - DNA, 15 bp, Homo sapiens
acatttaagtccatt

SEQ ID NO: 43222 - DNA, 15 bp, Homo sapiens
catttaagtccattt

SEQ ID NO: 43223 - DNA, 15 bp, Homo sapiens
atttaagtccatttc

SEQ ID NO: 43224 - DNA, 15 bp, Homo sapiens
tttaagtccatttca

SEQ ID NO: 43225 - DNA, 15 bp, Homo sapiens
ttaagtccatttcaa

SEQ ID NO: 43226 - DNA, 15 bp, Homo sapiens
taagtccatttcaaa

SEQ ID NO: 43227 - DNA, 15 bp, Homo sapiens
aagtccatttcaaat

SEQ ID NO: 43228 - DNA, 15 bp, Homo sapiens
agtccatttcaaatg

SEQ ID NO: 43229 - DNA, 15 bp, Homo sapiens
gtccatttcaaatgc

SEQ ID NO: 43230 - DNA, 15 bp, Homo sapiens
tccatttcaaatgcc

SEQ ID NO: 43231 - DNA, 15 bp, Homo sapiens
ccatttcaaatgcct

SEQ ID NO: 43232 - DNA, 15 bp, Homo sapiens
catttcaaatgcctc

SEQ ID NO: 43233 - DNA, 15 bp, Homo sapiens
atttcaaatgcctcc

SEQ ID NO: 43234 - DNA, 15 bp, Homo sapiens
tttcaaatgcctccc

SEQ ID NO: 43235 - DNA, 15 bp, Homo sapiens
ttcaaatgcctccca

SEQ ID NO: 43236 - DNA, 15 bp, Homo sapiens
tcaaatgcctcccat

SEQ ID NO: 43237 - DNA, 15 bp, Homo sapiens
caaatgcctcccata

SEQ ID NO: 43238 - DNA, 15 bp, Homo sapiens
aaatgcctcccatat

SEQ ID NO: 43239 - DNA, 15 bp, Homo sapiens
aatgcctcccatatg

SEQ ID NO: 43240 - DNA, 15 bp, Homo sapiens
atgcctcccatatgc

SEQ ID NO: 43241 - DNA, 15 bp, Homo sapiens
tgcctcccatatgca

SEQ ID NO: 43242 - DNA, 15 bp, Homo sapiens
gcctcccatatgcag

SEQ ID NO: 43243 - DNA, 15 bp, Homo sapiens
cctcccatatgcaga

SEQ ID NO: 43244 - DNA, 15 bp, Homo sapiens
ctcccatatgcagac

SEQ ID NO: 43245 - DNA, 15 bp, Homo sapiens
tcccatatgcagact

SEQ ID NO: 43246 - DNA, 15 bp, Homo sapiens
cccatatgcagactc

SEQ ID NO: 43247 - DNA, 15 bp, Homo sapiens
ccatatgcagactcc

SEQ ID NO: 43248 - DNA, 15 bp, Homo sapiens
catatgcagactcca

SEQ ID NO: 43249 - DNA, 15 bp, Homo sapiens
atatgcagactccac

SEQ ID NO: 43250 - DNA, 15 bp, Homo sapiens
tatgcagactccact

SEQ ID NO: 43251 - DNA, 15 bp, Homo sapiens
atgcagactccactt

SEQ ID NO: 43252 - DNA, 15 bp, Homo sapiens
tgcagactccacttt

SEQ ID NO: 43253 - DNA, 15 bp, Homo sapiens
gcagactccacttta

SEQ ID NO: 43254 - DNA, 15 bp, Homo sapiens
cagactccactttat

SEQ ID NO: 43255 - DNA, 15 bp, Homo sapiens
agactccactttatc

SEQ ID NO: 43256 - DNA, 15 bp, Homo sapiens
gactccactttatct

SEQ ID NO: 43257 - DNA, 15 bp, Homo sapiens
actccactttatctc

SEQ ID NO: 43258 - DNA, 15 bp, Homo sapiens
ctccactttatctcc

SEQ ID NO: 43259 - DNA, 15 bp, Homo sapiens
tccactttatctcct

SEQ ID NO: 43260 - DNA, 15 bp, Homo sapiens
ccactttatctcctc

SEQ ID NO: 43261 - DNA, 15 bp, Homo sapiens
cactttatctcctcc

SEQ ID NO: 43262 - DNA, 15 bp, Homo sapiens
actttatctcctcca

SEQ ID NO: 43263 - DNA, 15 bp, Homo sapiens
ctttatctcctccag

SEQ ID NO: 43264 - DNA, 15 bp, Homo sapiens
tttatctcctccagt

SEQ ID NO: 43265 - DNA, 15 bp, Homo sapiens
ttatctcctccagtt

SEQ ID NO: 43266 - DNA, 15 bp, Homo sapiens
tatctcctccagttc

SEQ ID NO: 43267 - DNA, 15 bp, Homo sapiens
atctcctccagttct

SEQ ID NO: 43268 - DNA, 15 bp, Homo sapiens
tctcctccagttctc

SEQ ID NO: 43269 - DNA, 15 bp, Homo sapiens
ctcctccagttctct

SEQ ID NO: 43270 - DNA, 15 bp, Homo sapiens
tcctccagttctcta

SEQ ID NO: 43271 - DNA, 15 bp, Homo sapiens
cctccagttctctaa

SEQ ID NO: 43272 - DNA, 15 bp, Homo sapiens
ctccagttctctaaa

SEQ ID NO: 43273 - DNA, 15 bp, Homo sapiens
tccagttctctaaaa

SEQ ID NO: 43274 - DNA, 15 bp, Homo sapiens
ccagttctctaaaac

SEQ ID NO: 43275 - DNA, 15 bp, Homo sapiens
cagttctctaaaacc

SEQ ID NO: 43276 - DNA, 15 bp, Homo sapiens
agttctctaaaaccc

SEQ ID NO: 43277 - DNA, 15 bp, Homo sapiens
gttctctaaaaccct

SEQ ID NO: 43278 - DNA, 15 bp, Homo sapiens
ttctctaaaaccctt

SEQ ID NO: 43279 - DNA, 15 bp, Homo sapiens
tctctaaaacccttc

SEQ ID NO: 43280 - DNA, 15 bp, Homo sapiens
ctctaaaacccttca

SEQ ID NO: 43281 - DNA, 15 bp, Homo sapiens
tctaaaacccttcac

SEQ ID NO: 43282 - DNA, 15 bp, Homo sapiens
ctaaaacccttcact

SEQ ID NO: 43283 - DNA, 15 bp, Homo sapiens
taaaacccttcactc

SEQ ID NO: 43284 - DNA, 15 bp, Homo sapiens
aaaacccttcactcc

SEQ ID NO: 43285 - DNA, 15 bp, Homo sapiens
aaacccttcactcct

SEQ ID NO: 43286 - DNA, 15 bp, Homo sapiens
aacccttcactcctt

SEQ ID NO: 43287 - DNA, 15 bp, Homo sapiens
acccttcactccttg

SEQ ID NO: 43288 - DNA, 15 bp, Homo sapiens
cccttcactccttgg

SEQ ID NO: 43289 - DNA, 15 bp, Homo sapiens
ccttcactccttggc

SEQ ID NO: 43290 - DNA, 15 bp, Homo sapiens
cttcactccttggct

SEQ ID NO: 43291 - DNA, 15 bp, Homo sapiens
ttcactccttggctt

SEQ ID NO: 43292 - DNA, 15 bp, Homo sapiens
tcactccttggcttt

SEQ ID NO: 43293 - DNA, 15 bp, Homo sapiens
cactccttggctttt

SEQ ID NO: 43294 - DNA, 15 bp, Homo sapiens
actccttggcttttt

SEQ ID NO: 43295 - DNA, 15 bp, Homo sapiens
ctccttggctttttc

SEQ ID NO: 43296 - DNA, 15 bp, Homo sapiens
tccttggctttttct

SEQ ID NO: 43297 - DNA, 15 bp, Homo sapiens
ccttggctttttctg

SEQ ID NO: 43298 - DNA, 15 bp, Homo sapiens
cttggctttttctgg

SEQ ID NO: 43299 - DNA, 15 bp, Homo sapiens
ttggctttttctggc

SEQ ID NO: 43300 - DNA, 15 bp, Homo sapiens
tggctttttctggct

SEQ ID NO: 43301 - DNA, 15 bp, Homo sapiens
ggctttttctggcta

SEQ ID NO: 43302 - DNA, 15 bp, Homo sapiens
gctttttctggctaa

SEQ ID NO: 43303 - DNA, 15 bp, Homo sapiens
ctttttctggctaat

SEQ ID NO: 43304 - DNA, 15 bp, Homo sapiens
tttttctggctaata

SEQ ID NO: 43305 - DNA, 15 bp, Homo sapiens
ttttctggctaatac

SEQ ID NO: 43306 - DNA, 15 bp, Homo sapiens
tttctggctaataca

SEQ ID NO: 43307 - DNA, 15 bp, Homo sapiens
ttctggctaatacac

SEQ ID NO: 43308 - DNA, 15 bp, Homo sapiens
tctggctaatacaca

SEQ ID NO: 43309 - DNA, 15 bp, Homo sapiens
ctggctaatacacac

SEQ ID NO: 43310 - DNA, 15 bp, Homo sapiens
tggctaatacacaca

SEQ ID NO: 43311 - DNA, 15 bp, Homo sapiens
ggctaatacacacat

SEQ ID NO: 43312 - DNA, 15 bp, Homo sapiens
gctaatacacacatc

SEQ ID NO: 43313 - DNA, 15 bp, Homo sapiens
ctaatacacacatct

SEQ ID NO: 43314 - DNA, 15 bp, Homo sapiens
taatacacacatcta

SEQ ID NO: 43315 - DNA, 15 bp, Homo sapiens
aatacacacatctag

SEQ ID NO: 43316 - DNA, 15 bp, Homo sapiens
atacacacatctagc

SEQ ID NO: 43317 - DNA, 15 bp, Homo sapiens
tacacacatctagct

SEQ ID NO: 43318 - DNA, 15 bp, Homo sapiens
acacacatctagcta

SEQ ID NO: 43319 - DNA, 15 bp, Homo sapiens
cacacatctagctaa

SEQ ID NO: 43320 - DNA, 15 bp, Homo sapiens
acacatctagctaag

SEQ ID NO: 43321 - DNA, 15 bp, Homo sapiens
cacatctagctaaga

SEQ ID NO: 43322 - DNA, 15 bp, Homo sapiens
acatctagctaagaa

SEQ ID NO: 43323 - DNA, 15 bp, Homo sapiens
catctagctaagaaa

SEQ ID NO: 43324 - DNA, 15 bp, Homo sapiens
atctagctaagaaag

SEQ ID NO: 43325 - DNA, 15 bp, Homo sapiens
tctagctaagaaagc

SEQ ID NO: 43326 - DNA, 15 bp, Homo sapiens
ctagctaagaaagct

SEQ ID NO: 43327 - DNA, 15 bp, Homo sapiens
tagctaagaaagctc

SEQ ID NO: 43328 - DNA, 15 bp, Homo sapiens
agctaagaaagctca

SEQ ID NO: 43329 - DNA, 15 bp, Homo sapiens
gctaagaaagctcaa

SEQ ID NO: 43330 - DNA, 15 bp, Homo sapiens
ctaagaaagctcaac

SEQ ID NO: 43331 - DNA, 15 bp, Homo sapiens
taagaaagctcaact

SEQ ID NO: 43332 - DNA, 15 bp, Homo sapiens
aagaaagctcaactt

SEQ ID NO: 43333 - DNA, 15 bp, Homo sapiens
agaaagctcaacttt

SEQ ID NO: 43334 - DNA, 15 bp, Homo sapiens
gaaagctcaactttt

SEQ ID NO: 43335 - DNA, 15 bp, Homo sapiens
aaagctcaacttttc

SEQ ID NO: 43336 - DNA, 15 bp, Homo sapiens
aagctcaacttttct

SEQ ID NO: 43337 - DNA, 15 bp, Homo sapiens
agctcaacttttctt

SEQ ID NO: 43338 - DNA, 15 bp, Homo sapiens
gctcaacttttcttt

SEQ ID NO: 43339 - DNA, 15 bp, Homo sapiens
ctcaacttttctttt

SEQ ID NO: 43340 - DNA, 15 bp, Homo sapiens
tcaacttttcttttt

SEQ ID NO: 43341 - DNA, 15 bp, Homo sapiens
caacttttcttttta

SEQ ID NO: 43342 - DNA, 15 bp, Homo sapiens
aacttttctttttac

SEQ ID NO: 43343 - DNA, 15 bp, Homo sapiens
acttttctttttact

SEQ ID NO: 43344 - DNA, 15 bp, Homo sapiens
cttttctttttacta

SEQ ID NO: 43345 - DNA, 15 bp, Homo sapiens
ttttctttttactag

SEQ ID NO: 43346 - DNA, 15 bp, Homo sapiens
tttctttttactaga

SEQ ID NO: 43347 - DNA, 15 bp, Homo sapiens
ttctttttactagag

SEQ ID NO: 43348 - DNA, 15 bp, Homo sapiens
tctttttactagaga

SEQ ID NO: 43349 - DNA, 15 bp, Homo sapiens
ctttttactagagat

SEQ ID NO: 43350 - DNA, 15 bp, Homo sapiens
tttttactagagatg

SEQ ID NO: 43351 - DNA, 15 bp, Homo sapiens
ttttactagagatgt

SEQ ID NO: 43352 - DNA, 15 bp, Homo sapiens
tttactagagatgtt

SEQ ID NO: 43353 - DNA, 15 bp, Homo sapiens
ttactagagatgttc

SEQ ID NO: 43354 - DNA, 15 bp, Homo sapiens
tactagagatgttct

SEQ ID NO: 43355 - DNA, 15 bp, Homo sapiens
actagagatgttctc

SEQ ID NO: 43356 - DNA, 15 bp, Homo sapiens
ctagagatgttctct

SEQ ID NO: 43357 - DNA, 15 bp, Homo sapiens
tagagatgttctctc

SEQ ID NO: 43358 - DNA, 15 bp, Homo sapiens
agagatgttctctct

SEQ ID NO: 43359 - DNA, 15 bp, Homo sapiens
gagatgttctctctg

SEQ ID NO: 43360 - DNA, 15 bp, Homo sapiens
agatgttctctctgt

SEQ ID NO: 43361 - DNA, 15 bp, Homo sapiens
gatgttctctctgtg

SEQ ID NO: 43362 - DNA, 15 bp, Homo sapiens
atgttctctctgtgt

SEQ ID NO: 43363 - DNA, 15 bp, Homo sapiens
tgttctctctgtgtg

SEQ ID NO: 43364 - DNA, 15 bp, Homo sapiens
gttctctctgtgtgt

SEQ ID NO: 43365 - DNA, 15 bp, Homo sapiens
ttctctctgtgtgtg

SEQ ID NO: 43366 - DNA, 15 bp, Homo sapiens
tgtgtgtgtgtgcgc

SEQ ID NO: 43367 - DNA, 15 bp, Homo sapiens
gtgtgtgtgtgcgcg

SEQ ID NO: 43368 - DNA, 15 bp, Homo sapiens
tgtgtgtgtgcgcgc

SEQ ID NO: 43369 - DNA, 15 bp, Homo sapiens
gtgtgtgtgcgcgcg

SEQ ID NO: 43370 - DNA, 15 bp, Homo sapiens
tgtgtgtgcgcgcgc

SEQ ID NO: 43371 - DNA, 15 bp, Homo sapiens
gtgtgtgcgcgcgcg

SEQ ID NO: 43372 - DNA, 15 bp, Homo sapiens
tgtgtgcgcgcgcgc

SEQ ID NO: 43373 - DNA, 15 bp, Homo sapiens
gtgtgcgcgcgcgcg

SEQ ID NO: 43374 - DNA, 15 bp, Homo sapiens
tgtgcgcgcgcgcgt

SEQ ID NO: 43375 - DNA, 15 bp, Homo sapiens
gtgcgcgcgcgcgtg

SEQ ID NO: 43376 - DNA, 15 bp, Homo sapiens
tgcgcgcgcgcgtgt

SEQ ID NO: 43377 - DNA, 15 bp, Homo sapiens
gcgcgcgcgcgtgtg

SEQ ID NO: 43378 - DNA, 15 bp, Homo sapiens
cgcgcgcgcgtgtgc

SEQ ID NO: 43379 - DNA, 15 bp, Homo sapiens
gcgcgcgcgtgtgcg

SEQ ID NO: 43380 - DNA, 15 bp, Homo sapiens
cgcgcgcgtgtgcgc

SEQ ID NO: 43381 - DNA, 15 bp, Homo sapiens
gcgcgcgtgtgcgcg

SEQ ID NO: 43382 - DNA, 15 bp, Homo sapiens
cgcgcgtgtgcgcgc

SEQ ID NO: 43383 - DNA, 15 bp, Homo sapiens
gcgcgtgtgcgcgcg

SEQ ID NO: 43384 - DNA, 15 bp, Homo sapiens
cgcgtgtgcgcgcgc

SEQ ID NO: 43385 - DNA, 15 bp, Homo sapiens
gcgtgtgcgcgcgct

SEQ ID NO: 43386 - DNA, 15 bp, Homo sapiens
cgtgtgcgcgcgctc

SEQ ID NO: 43387 - DNA, 15 bp, Homo sapiens
gtgtgcgcgcgctct

SEQ ID NO: 43388 - DNA, 15 bp, Homo sapiens
tgtgcgcgcgctctg

SEQ ID NO: 43389 - DNA, 15 bp, Homo sapiens
gtgcgcgcgctctga

SEQ ID NO: 43390 - DNA, 15 bp, Homo sapiens
tgcgcgcgctctgag

SEQ ID NO: 43391 - DNA, 15 bp, Homo sapiens
gcgcgcgctctgagt

SEQ ID NO: 43392 - DNA, 15 bp, Homo sapiens
cgcgcgctctgagtt

SEQ ID NO: 43393 - DNA, 15 bp, Homo sapiens
gcgcgctctgagttt

SEQ ID NO: 43394 - DNA, 15 bp, Homo sapiens
cgcgctctgagttta

SEQ ID NO: 43395 - DNA, 15 bp, Homo sapiens
gcgctctgagtttat

SEQ ID NO: 43396 - DNA, 15 bp, Homo sapiens
cgctctgagtttatc

SEQ ID NO: 43397 - DNA, 15 bp, Homo sapiens
gctctgagtttatcc

SEQ ID NO: 43398 - DNA, 15 bp, Homo sapiens
ctctgagtttatcct

SEQ ID NO: 43399 - DNA, 15 bp, Homo sapiens
tctgagtttatccta

SEQ ID NO: 43400 - DNA, 15 bp, Homo sapiens
ctgagtttatcctac

SEQ ID NO: 43401 - DNA, 15 bp, Homo sapiens
tgagtttatcctact

SEQ ID NO: 43402 - DNA, 15 bp, Homo sapiens
gagtttatcctactt

SEQ ID NO: 43403 - DNA, 15 bp, Homo sapiens
agtttatcctacttt

SEQ ID NO: 43404 - DNA, 15 bp, Homo sapiens
gtttatcctactttt

SEQ ID NO: 43405 - DNA, 15 bp, Homo sapiens
tttatcctactttta

SEQ ID NO: 43406 - DNA, 15 bp, Homo sapiens
ttatcctacttttaa

SEQ ID NO: 43407 - DNA, 15 bp, Homo sapiens
tatcctacttttaaa

SEQ ID NO: 43408 - DNA, 15 bp, Homo sapiens
atcctacttttaaaa

SEQ ID NO: 43409 - DNA, 15 bp, Homo sapiens
tcctacttttaaaaa

SEQ ID NO: 43410 - DNA, 15 bp, Homo sapiens
cctacttttaaaaag

SEQ ID NO: 43411 - DNA, 15 bp, Homo sapiens
ctacttttaaaaagc

SEQ ID NO: 43412 - DNA, 15 bp, Homo sapiens
tacttttaaaaagct

SEQ ID NO: 43413 - DNA, 15 bp, Homo sapiens
acttttaaaaagctg

SEQ ID NO: 43414 - DNA, 15 bp, Homo sapiens
cttttaaaaagctga

SEQ ID NO: 43415 - DNA, 15 bp, Homo sapiens
ttttaaaaagctgag

SEQ ID NO: 43416 - DNA, 15 bp, Homo sapiens
tttaaaaagctgagt

SEQ ID NO: 43417 - DNA, 15 bp, Homo sapiens
ttaaaaagctgagtg

SEQ ID NO: 43418 - DNA, 15 bp, Homo sapiens
taaaaagctgagtgg

SEQ ID NO: 43419 - DNA, 15 bp, Homo sapiens
aaaaagctgagtggt

SEQ ID NO: 43420 - DNA, 15 bp, Homo sapiens
aaaagctgagtggtg

SEQ ID NO: 43421 - DNA, 15 bp, Homo sapiens
aaagctgagtggtgt

SEQ ID NO: 43422 - DNA, 15 bp, Homo sapiens
aagctgagtggtgtt

SEQ ID NO: 43423 - DNA, 15 bp, Homo sapiens
agctgagtggtgttt

SEQ ID NO: 43424 - DNA, 15 bp, Homo sapiens
gctgagtggtgtttt

SEQ ID NO: 43425 - DNA, 15 bp, Homo sapiens
ctgagtggtgtttta

SEQ ID NO: 43426 - DNA, 15 bp, Homo sapiens
tgagtggtgttttac

SEQ ID NO: 43427 - DNA, 15 bp, Homo sapiens
gagtggtgttttaca

SEQ ID NO: 43428 - DNA, 15 bp, Homo sapiens
agtggtgttttacac

SEQ ID NO: 43429 - DNA, 15 bp, Homo sapiens
gtggtgttttacaca

SEQ ID NO: 43430 - DNA, 15 bp, Homo sapiens
tggtgttttacacat

SEQ ID NO: 43431 - DNA, 15 bp, Homo sapiens
ggtgttttacacatt

SEQ ID NO: 43432 - DNA, 15 bp, Homo sapiens
gtgttttacacattt

SEQ ID NO: 43433 - DNA, 15 bp, Homo sapiens
tgttttacacatttt

SEQ ID NO: 43434 - DNA, 15 bp, Homo sapiens
gttttacacattttg

SEQ ID NO: 43435 - DNA, 15 bp, Homo sapiens
ttttacacattttgg

SEQ ID NO: 43436 - DNA, 15 bp, Homo sapiens
tttacacattttgga

SEQ ID NO: 43437 - DNA, 15 bp, Homo sapiens
ttacacattttggaa

SEQ ID NO: 43438 - DNA, 15 bp, Homo sapiens
tacacattttggaat

SEQ ID NO: 43439 - DNA, 15 bp, Homo sapiens
acacattttggaata

SEQ ID NO: 43440 - DNA, 15 bp, Homo sapiens
cacattttggaatag

SEQ ID NO: 43441 - DNA, 15 bp, Homo sapiens
acattttggaatagg

SEQ ID NO: 43442 - DNA, 15 bp, Homo sapiens
cattttggaataggc

SEQ ID NO: 43443 - DNA, 15 bp, Homo sapiens
attttggaataggca

SEQ ID NO: 43444 - DNA, 15 bp, Homo sapiens
ttttggaataggcag

SEQ ID NO: 43445 - DNA, 15 bp, Homo sapiens
tttggaataggcagc

SEQ ID NO: 43446 - DNA, 15 bp, Homo sapiens
ttggaataggcagct

SEQ ID NO: 43447 - DNA, 15 bp, Homo sapiens
tggaataggcagcta

SEQ ID NO: 43448 - DNA, 15 bp, Homo sapiens
ggaataggcagctag

SEQ ID NO: 43449 - DNA, 15 bp, Homo sapiens
gaataggcagctagt

SEQ ID NO: 43450 - DNA, 15 bp, Homo sapiens
aataggcagctagtg

SEQ ID NO: 43451 - DNA, 15 bp, Homo sapiens
ataggcagctagtgc

SEQ ID NO: 43452 - DNA, 15 bp, Homo sapiens
taggcagctagtgct

SEQ ID NO: 43453 - DNA, 15 bp, Homo sapiens
aggcagctagtgctt

SEQ ID NO: 43454 - DNA, 15 bp, Homo sapiens
ggcagctagtgcttc

SEQ ID NO: 43455 - DNA, 15 bp, Homo sapiens
gcagctagtgcttct

SEQ ID NO: 43456 - DNA, 15 bp, Homo sapiens
cagctagtgcttctt

SEQ ID NO: 43457 - DNA, 15 bp, Homo sapiens
agctagtgcttcttt

SEQ ID NO: 43458 - DNA, 15 bp, Homo sapiens
gctagtgcttctttt

SEQ ID NO: 43459 - DNA, 15 bp, Homo sapiens
ctagtgcttcttttt

SEQ ID NO: 43460 - DNA, 15 bp, Homo sapiens
tagtgcttctttttc

SEQ ID NO: 43461 - DNA, 15 bp, Homo sapiens
agtgcttctttttct

SEQ ID NO: 43462 - DNA, 15 bp, Homo sapiens
gtgcttctttttctg

SEQ ID NO: 43463 - DNA, 15 bp, Homo sapiens
tgcttctttttctgc

SEQ ID NO: 43464 - DNA, 15 bp, Homo sapiens
gcttctttttctgct

SEQ ID NO: 43465 - DNA, 15 bp, Homo sapiens
cttctttttctgctt

SEQ ID NO: 43466 - DNA, 15 bp, Homo sapiens
ttctttttctgcttt

SEQ ID NO: 43467 - DNA, 15 bp, Homo sapiens
tctttttctgctttt

SEQ ID NO: 43468 - DNA, 15 bp, Homo sapiens
ctttttctgcttttg

SEQ ID NO: 43469 - DNA, 15 bp, Homo sapiens
tttttctgcttttga

SEQ ID NO: 43470 - DNA, 15 bp, Homo sapiens
ttttctgcttttgaa

SEQ ID NO: 43471 - DNA, 15 bp, Homo sapiens
tttctgcttttgaag

SEQ ID NO: 43472 - DNA, 15 bp, Homo sapiens
ttctgcttttgaagt

SEQ ID NO: 43473 - DNA, 15 bp, Homo sapiens
tctgcttttgaagtt

SEQ ID NO: 43474 - DNA, 15 bp, Homo sapiens
ctgcttttgaagttt

SEQ ID NO: 43475 - DNA, 15 bp, Homo sapiens
tgcttttgaagtttc

SEQ ID NO: 43476 - DNA, 15 bp, Homo sapiens
gcttttgaagtttcc

SEQ ID NO: 43477 - DNA, 15 bp, Homo sapiens
cttttgaagtttcct

SEQ ID NO: 43478 - DNA, 15 bp, Homo sapiens
ttttgaagtttcctg

SEQ ID NO: 43479 - DNA, 15 bp, Homo sapiens
tttgaagtttcctgg

SEQ ID NO: 43480 - DNA, 15 bp, Homo sapiens
ttgaagtttcctggg

SEQ ID NO: 43481 - DNA, 15 bp, Homo sapiens
tgaagtttcctggga

SEQ ID NO: 43482 - DNA, 15 bp, Homo sapiens
gaagtttcctgggaa

SEQ ID NO: 43483 - DNA, 15 bp, Homo sapiens
aagtttcctgggaag

SEQ ID NO: 43484 - DNA, 15 bp, Homo sapiens
agtttcctgggaagt

SEQ ID NO: 43485 - DNA, 15 bp, Homo sapiens
gtttcctgggaagtc

SEQ ID NO: 43486 - DNA, 15 bp, Homo sapiens
tttcctgggaagtcc

SEQ ID NO: 43487 - DNA, 15 bp, Homo sapiens
ttcctgggaagtccc

SEQ ID NO: 43488 - DNA, 15 bp, Homo sapiens
tcctgggaagtccct

SEQ ID NO: 43489 - DNA, 15 bp, Homo sapiens
cctgggaagtccctt

SEQ ID NO: 43490 - DNA, 15 bp, Homo sapiens
ctgggaagtccctta

SEQ ID NO: 43491 - DNA, 15 bp, Homo sapiens
tgggaagtcccttaa

SEQ ID NO: 43492 - DNA, 15 bp, Homo sapiens
gggaagtcccttaaa

SEQ ID NO: 43493 - DNA, 15 bp, Homo sapiens
ggaagtcccttaaaa

SEQ ID NO: 43494 - DNA, 15 bp, Homo sapiens
gaagtcccttaaaag

SEQ ID NO: 43495 - DNA, 15 bp, Homo sapiens
aagtcccttaaaagc

SEQ ID NO: 43496 - DNA, 15 bp, Homo sapiens
agtcccttaaaagca

SEQ ID NO: 43497 - DNA, 15 bp, Homo sapiens
gtcccttaaaagcat

SEQ ID NO: 43498 - DNA, 15 bp, Homo sapiens
tcccttaaaagcata

SEQ ID NO: 43499 - DNA, 15 bp, Homo sapiens
cccttaaaagcatac

SEQ ID NO: 43500 - DNA, 15 bp, Homo sapiens
ccttaaaagcatacc

SEQ ID NO: 43501 - DNA, 15 bp, Homo sapiens
cttaaaagcatacca

SEQ ID NO: 43502 - DNA, 15 bp, Homo sapiens
ttaaaagcataccac

SEQ ID NO: 43503 - DNA, 15 bp, Homo sapiens
taaaagcataccaca

SEQ ID NO: 43504 - DNA, 15 bp, Homo sapiens
aaaagcataccacaa

SEQ ID NO: 43505 - DNA, 15 bp, Homo sapiens
aaagcataccacaaa

SEQ ID NO: 43506 - DNA, 15 bp, Homo sapiens
aagcataccacaaaa

SEQ ID NO: 43507 - DNA, 15 bp, Homo sapiens
agcataccacaaaat

SEQ ID NO: 43508 - DNA, 15 bp, Homo sapiens
gcataccacaaaatt

SEQ ID NO: 43509 - DNA, 15 bp, Homo sapiens
cataccacaaaatta

SEQ ID NO: 43510 - DNA, 15 bp, Homo sapiens
ataccacaaaattaa

SEQ ID NO: 43511 - DNA, 15 bp, Homo sapiens
taccacaaaattaat

SEQ ID NO: 43512 - DNA, 15 bp, Homo sapiens
accacaaaattaatc

SEQ ID NO: 43513 - DNA, 15 bp, Homo sapiens
ccacaaaattaatct

SEQ ID NO: 43514 - DNA, 15 bp, Homo sapiens
cacaaaattaatctc

SEQ ID NO: 43515 - DNA, 15 bp, Homo sapiens
acaaaattaatctct

SEQ ID NO: 43516 - DNA, 15 bp, Homo sapiens
caaaattaatctctt

SEQ ID NO: 43517 - DNA, 15 bp, Homo sapiens
aaaattaatctcttc

SEQ ID NO: 43518 - DNA, 15 bp, Homo sapiens
aaattaatctcttcc

SEQ ID NO: 43519 - DNA, 15 bp, Homo sapiens
aattaatctcttcct

SEQ ID NO: 43520 - DNA, 15 bp, Homo sapiens
attaatctcttcctg

SEQ ID NO: 43521 - DNA, 15 bp, Homo sapiens
ttaatctcttcctgt

SEQ ID NO: 43522 - DNA, 15 bp, Homo sapiens
taatctcttcctgtt

SEQ ID NO: 43523 - DNA, 15 bp, Homo sapiens
aatctcttcctgttt

SEQ ID NO: 43524 - DNA, 15 bp, Homo sapiens
atctcttcctgtttg

SEQ ID NO: 43525 - DNA, 15 bp, Homo sapiens
tctcttcctgtttgc

SEQ ID NO: 43526 - DNA, 15 bp, Homo sapiens
ctcttcctgtttgcc

SEQ ID NO: 43527 - DNA, 15 bp, Homo sapiens
tcttcctgtttgcca

SEQ ID NO: 43528 - DNA, 15 bp, Homo sapiens
cttcctgtttgccag

SEQ ID NO: 43529 - DNA, 15 bp, Homo sapiens
ttcctgtttgccaga

SEQ ID NO: 43530 - DNA, 15 bp, Homo sapiens
tcctgtttgccagag

SEQ ID NO: 43531 - DNA, 15 bp, Homo sapiens
cctgtttgccagagg

SEQ ID NO: 43532 - DNA, 15 bp, Homo sapiens
ctgtttgccagaggg

SEQ ID NO: 43533 - DNA, 15 bp, Homo sapiens
tgtttgccagagggt

SEQ ID NO: 43534 - DNA, 15 bp, Homo sapiens
gtttgccagagggtt

SEQ ID NO: 43535 - DNA, 15 bp, Homo sapiens
tttgccagagggttg

SEQ ID NO: 43536 - DNA, 15 bp, Homo sapiens
ttgccagagggttgc

SEQ ID NO: 43537 - DNA, 15 bp, Homo sapiens
tgccagagggttgct

SEQ ID NO: 43538 - DNA, 15 bp, Homo sapiens
gccagagggttgctc

SEQ ID NO: 43539 - DNA, 15 bp, Homo sapiens
ccagagggttgctct

SEQ ID NO: 43540 - DNA, 15 bp, Homo sapiens
cagagggttgctcta

SEQ ID NO: 43541 - DNA, 15 bp, Homo sapiens
agagggttgctctac

SEQ ID NO: 43542 - DNA, 15 bp, Homo sapiens
gagggttgctctact

SEQ ID NO: 43543 - DNA, 15 bp, Homo sapiens
agggttgctctactc

SEQ ID NO: 43544 - DNA, 15 bp, Homo sapiens
gggttgctctactct

SEQ ID NO: 43545 - DNA, 15 bp, Homo sapiens
ggttgctctactcta

SEQ ID NO: 43546 - DNA, 15 bp, Homo sapiens
gttgctctactctaa

SEQ ID NO: 43547 - DNA, 15 bp, Homo sapiens
ttgctctactctaaa

SEQ ID NO: 43548 - DNA, 15 bp, Homo sapiens
tgctctactctaaat

SEQ ID NO: 43549 - DNA, 15 bp, Homo sapiens
gctctactctaaatt

SEQ ID NO: 43550 - DNA, 15 bp, Homo sapiens
ctctactctaaattt

SEQ ID NO: 43551 - DNA, 15 bp, Homo sapiens
tctactctaaatttg

SEQ ID NO: 43552 - DNA, 15 bp, Homo sapiens
ctactctaaatttgg

SEQ ID NO: 43553 - DNA, 15 bp, Homo sapiens
tactctaaatttggc

SEQ ID NO: 43554 - DNA, 15 bp, Homo sapiens
actctaaatttggct

SEQ ID NO: 43555 - DNA, 15 bp, Homo sapiens
ctctaaatttggctc

SEQ ID NO: 43556 - DNA, 15 bp, Homo sapiens
tctaaatttggctct

SEQ ID NO: 43557 - DNA, 15 bp, Homo sapiens
ctaaatttggctcta

SEQ ID NO: 43558 - DNA, 15 bp, Homo sapiens
taaatttggctctac

SEQ ID NO: 43559 - DNA, 15 bp, Homo sapiens
aaatttggctctaca

SEQ ID NO: 43560 - DNA, 15 bp, Homo sapiens
aatttggctctacat

SEQ ID NO: 43561 - DNA, 15 bp, Homo sapiens
atttggctctacatc

SEQ ID NO: 43562 - DNA, 15 bp, Homo sapiens
tttggctctacatct

SEQ ID NO: 43563 - DNA, 15 bp, Homo sapiens
ttggctctacatcta

SEQ ID NO: 43564 - DNA, 15 bp, Homo sapiens
tggctctacatctac

SEQ ID NO: 43565 - DNA, 15 bp, Homo sapiens
ggctctacatctaca

SEQ ID NO: 43566 - DNA, 15 bp, Homo sapiens
gctctacatctacaa

SEQ ID NO: 43567 - DNA, 15 bp, Homo sapiens
ctctacatctacaag

SEQ ID NO: 43568 - DNA, 15 bp, Homo sapiens
tctacatctacaagc

SEQ ID NO: 43569 - DNA, 15 bp, Homo sapiens
ctacatctacaagca

SEQ ID NO: 43570 - DNA, 15 bp, Homo sapiens
tacatctacaagcat

SEQ ID NO: 43571 - DNA, 15 bp, Homo sapiens
acatctacaagcatg

SEQ ID NO: 43572 - DNA, 15 bp, Homo sapiens
catctacaagcatgc

SEQ ID NO: 43573 - DNA, 15 bp, Homo sapiens
atctacaagcatgct

SEQ ID NO: 43574 - DNA, 15 bp, Homo sapiens
tctacaagcatgctc

SEQ ID NO: 43575 - DNA, 15 bp, Homo sapiens
ctacaagcatgctct

SEQ ID NO: 43576 - DNA, 15 bp, Homo sapiens
tacaagcatgctcta

SEQ ID NO: 43577 - DNA, 15 bp, Homo sapiens
acaagcatgctctag

SEQ ID NO: 43578 - DNA, 15 bp, Homo sapiens
caagcatgctctagg

SEQ ID NO: 43579 - DNA, 15 bp, Homo sapiens
aagcatgctctagga

SEQ ID NO: 43580 - DNA, 15 bp, Homo sapiens
agcatgctctaggaa

SEQ ID NO: 43581 - DNA, 15 bp, Homo sapiens
gcatgctctaggaag

SEQ ID NO: 43582 - DNA, 15 bp, Homo sapiens
catgctctaggaagc

SEQ ID NO: 43583 - DNA, 15 bp, Homo sapiens
atgctctaggaagcc

SEQ ID NO: 43584 - DNA, 15 bp, Homo sapiens
tgctctaggaagcca

SEQ ID NO: 43585 - DNA, 15 bp, Homo sapiens
gctctaggaagccaa

SEQ ID NO: 43586 - DNA, 15 bp, Homo sapiens
ctctaggaagccaat

SEQ ID NO: 43587 - DNA, 15 bp, Homo sapiens
tctaggaagccaatt

SEQ ID NO: 43588 - DNA, 15 bp, Homo sapiens
ctaggaagccaatta

SEQ ID NO: 43589 - DNA, 15 bp, Homo sapiens
taggaagccaattaa

SEQ ID NO: 43590 - DNA, 15 bp, Homo sapiens
aggaagccaattaaa

SEQ ID NO: 43591 - DNA, 15 bp, Homo sapiens
ggaagccaattaaaa

SEQ ID NO: 43592 - DNA, 15 bp, Homo sapiens
gaagccaattaaaat

SEQ ID NO: 43593 - DNA, 15 bp, Homo sapiens
aagccaattaaaatg

SEQ ID NO: 43594 - DNA, 15 bp, Homo sapiens
agccaattaaaatgg

SEQ ID NO: 43595 - DNA, 15 bp, Homo sapiens
gccaattaaaatgga

SEQ ID NO: 43596 - DNA, 15 bp, Homo sapiens
ccaattaaaatggat

SEQ ID NO: 43597 - DNA, 15 bp, Homo sapiens
caattaaaatggatg

SEQ ID NO: 43598 - DNA, 15 bp, Homo sapiens
aattaaaatggatga

SEQ ID NO: 43599 - DNA, 15 bp, Homo sapiens
attaaaatggatgaa

SEQ ID NO: 43600 - DNA, 15 bp, Homo sapiens
ttaaaatggatgaac

SEQ ID NO: 43601 - DNA, 15 bp, Homo sapiens
taaaatggatgaaca

SEQ ID NO: 43602 - DNA, 15 bp, Homo sapiens
aaaatggatgaacaa

SEQ ID NO: 43603 - DNA, 15 bp, Homo sapiens
aaatggatgaacaag

SEQ ID NO: 43604 - DNA, 15 bp, Homo sapiens
aatggatgaacaagc

SEQ ID NO: 43605 - DNA, 15 bp, Homo sapiens
atggatgaacaagca

SEQ ID NO: 43606 - DNA, 15 bp, Homo sapiens
tggatgaacaagcaa

SEQ ID NO: 43607 - DNA, 15 bp, Homo sapiens
ggatgaacaagcaaa

SEQ ID NO: 43608 - DNA, 15 bp, Homo sapiens
gatgaacaagcaaaa

SEQ ID NO: 43609 - DNA, 15 bp, Homo sapiens
atgaacaagcaaaat

SEQ ID NO: 43610 - DNA, 15 bp, Homo sapiens
tgaacaagcaaaatg

SEQ ID NO: 43611 - DNA, 15 bp, Homo sapiens
gaacaagcaaaatga

SEQ ID NO: 43612 - DNA, 15 bp, Homo sapiens
aacaagcaaaatgaa

SEQ ID NO: 43613 - DNA, 15 bp, Homo sapiens
acaagcaaaatgaaa

SEQ ID NO: 43614 - DNA, 15 bp, Homo sapiens
caagcaaaatgaaaa

SEQ ID NO: 43615 - DNA, 15 bp, Homo sapiens
aagcaaaatgaaaac

SEQ ID NO: 43616 - DNA, 15 bp, Homo sapiens
agcaaaatgaaaaca

SEQ ID NO: 43617 - DNA, 15 bp, Homo sapiens
gcaaaatgaaaacat

SEQ ID NO: 43618 - DNA, 15 bp, Homo sapiens
caaaatgaaaacata

SEQ ID NO: 43619 - DNA, 15 bp, Homo sapiens
aaaatgaaaacatac

SEQ ID NO: 43620 - DNA, 15 bp, Homo sapiens
aaatgaaaacatacc

SEQ ID NO: 43621 - DNA, 15 bp, Homo sapiens
aatgaaaacatacct

SEQ ID NO: 43622 - DNA, 15 bp, Homo sapiens
atgaaaacataccta

SEQ ID NO: 43623 - DNA, 15 bp, Homo sapiens
tgaaaacatacctat

SEQ ID NO: 43624 - DNA, 15 bp, Homo sapiens
gaaaacatacctatg

SEQ ID NO: 43625 - DNA, 15 bp, Homo sapiens
aaaacatacctatgg

SEQ ID NO: 43626 - DNA, 15 bp, Homo sapiens
aaacatacctatgga

SEQ ID NO: 43627 - DNA, 15 bp, Homo sapiens
aacatacctatggac

SEQ ID NO: 43628 - DNA, 15 bp, Homo sapiens
acatacctatggacc

SEQ ID NO: 43629 - DNA, 15 bp, Homo sapiens
catacctatggacca

SEQ ID NO: 43630 - DNA, 15 bp, Homo sapiens
atacctatggaccaa

SEQ ID NO: 43631 - DNA, 15 bp, Homo sapiens
tacctatggaccaac

SEQ ID NO: 43632 - DNA, 15 bp, Homo sapiens
acctatggaccaacc

SEQ ID NO: 43633 - DNA, 15 bp, Homo sapiens
cctatggaccaaccc

SEQ ID NO: 43634 - DNA, 15 bp, Homo sapiens
ctatggaccaaccca

SEQ ID NO: 43635 - DNA, 15 bp, Homo sapiens
tatggaccaacccaa

SEQ ID NO: 43636 - DNA, 15 bp, Homo sapiens
atggaccaacccaag

SEQ ID NO: 43637 - DNA, 15 bp, Homo sapiens
tggaccaacccaagg

SEQ ID NO: 43638 - DNA, 15 bp, Homo sapiens
ggaccaacccaaggt

SEQ ID NO: 43639 - DNA, 15 bp, Homo sapiens
gaccaacccaaggtt

SEQ ID NO: 43640 - DNA, 15 bp, Homo sapiens
accaacccaaggtta

SEQ ID NO: 43641 - DNA, 15 bp, Homo sapiens
ccaacccaaggttac

SEQ ID NO: 43642 - DNA, 15 bp, Homo sapiens
caacccaaggttacc

SEQ ID NO: 43643 - DNA, 15 bp, Homo sapiens
aacccaaggttaccg

SEQ ID NO: 43644 - DNA, 15 bp, Homo sapiens
acccaaggttaccgt

SEQ ID NO: 43645 - DNA, 15 bp, Homo sapiens
cccaaggttaccgtc

SEQ ID NO: 43646 - DNA, 15 bp, Homo sapiens
ccaaggttaccgtca

SEQ ID NO: 43647 - DNA, 15 bp, Homo sapiens
caaggttaccgtcag

SEQ ID NO: 43648 - DNA, 15 bp, Homo sapiens
aaggttaccgtcagg

SEQ ID NO: 43649 - DNA, 15 bp, Homo sapiens
aggttaccgtcaggt

SEQ ID NO: 43650 - DNA, 15 bp, Homo sapiens
ggttaccgtcaggtg

SEQ ID NO: 43651 - DNA, 15 bp, Homo sapiens
gttaccgtcaggtgg

SEQ ID NO: 43652 - DNA, 15 bp, Homo sapiens
ttaccgtcaggtggt

SEQ ID NO: 43653 - DNA, 15 bp, Homo sapiens
taccgtcaggtggtg

SEQ ID NO: 43654 - DNA, 15 bp, Homo sapiens
accgtcaggtggtga

SEQ ID NO: 43655 - DNA, 15 bp, Homo sapiens
ccgtcaggtggtgaa

SEQ ID NO: 43656 - DNA, 15 bp, Homo sapiens
cgtcaggtggtgaag

SEQ ID NO: 43657 - DNA, 15 bp, Homo sapiens
gtcaggtggtgaagg

SEQ ID NO: 43658 - DNA, 15 bp, Homo sapiens
tcaggtggtgaagga

SEQ ID NO: 43659 - DNA, 15 bp, Homo sapiens
caggtggtgaaggac

SEQ ID NO: 43660 - DNA, 15 bp, Homo sapiens
aggtggtgaaggact

SEQ ID NO: 43661 - DNA, 15 bp, Homo sapiens
ggtggtgaaggactt

SEQ ID NO: 43662 - DNA, 15 bp, Homo sapiens
gtggtgaaggacttc

SEQ ID NO: 43663 - DNA, 15 bp, Homo sapiens
tggtgaaggacttca

SEQ ID NO: 43664 - DNA, 15 bp, Homo sapiens
ggtgaaggacttcag

SEQ ID NO: 43665 - DNA, 15 bp, Homo sapiens
gtgaaggacttcaga

SEQ ID NO: 43666 - DNA, 15 bp, Homo sapiens
tgaaggacttcagaa

SEQ ID NO: 43667 - DNA, 15 bp, Homo sapiens
gaaggacttcagaat

SEQ ID NO: 43668 - DNA, 15 bp, Homo sapiens
aaggacttcagaatc

SEQ ID NO: 43669 - DNA, 15 bp, Homo sapiens
aggacttcagaatca

SEQ ID NO: 43670 - DNA, 15 bp, Homo sapiens
ggacttcagaatcac

SEQ ID NO: 43671 - DNA, 15 bp, Homo sapiens
gacttcagaatcact

SEQ ID NO: 43672 - DNA, 15 bp, Homo sapiens
acttcagaatcactt

SEQ ID NO: 43673 - DNA, 15 bp, Homo sapiens
cttcagaatcactta

SEQ ID NO: 43674 - DNA, 15 bp, Homo sapiens
ttcagaatcacttac

SEQ ID NO: 43675 - DNA, 15 bp, Homo sapiens
tcagaatcacttacc

SEQ ID NO: 43676 - DNA, 15 bp, Homo sapiens
cagaatcacttacct

SEQ ID NO: 43677 - DNA, 15 bp, Homo sapiens
agaatcacttacctg

SEQ ID NO: 43678 - DNA, 15 bp, Homo sapiens
gaatcacttacctga

SEQ ID NO: 43679 - DNA, 15 bp, Homo sapiens
aatcacttacctgaa

SEQ ID NO: 43680 - DNA, 15 bp, Homo sapiens
atcacttacctgaag

SEQ ID NO: 43681 - DNA, 15 bp, Homo sapiens
tcacttacctgaagc

SEQ ID NO: 43682 - DNA, 15 bp, Homo sapiens
cacttacctgaagca

SEQ ID NO: 43683 - DNA, 15 bp, Homo sapiens
acttacctgaagcat

SEQ ID NO: 43684 - DNA, 15 bp, Homo sapiens
cttacctgaagcatt

SEQ ID NO: 43685 - DNA, 15 bp, Homo sapiens
ttacctgaagcattg

SEQ ID NO: 43686 - DNA, 15 bp, Homo sapiens
tacctgaagcattgt

SEQ ID NO: 43687 - DNA, 15 bp, Homo sapiens
acctgaagcattgtg

SEQ ID NO: 43688 - DNA, 15 bp, Homo sapiens
cctgaagcattgtgt

SEQ ID NO: 43689 - DNA, 15 bp, Homo sapiens
ctgaagcattgtgtt

SEQ ID NO: 43690 - DNA, 15 bp, Homo sapiens
tgaagcattgtgttt

SEQ ID NO: 43691 - DNA, 15 bp, Homo sapiens
gaagcattgtgtttc

SEQ ID NO: 43692 - DNA, 15 bp, Homo sapiens
aagcattgtgtttct

SEQ ID NO: 43693 - DNA, 15 bp, Homo sapiens
agcattgtgtttctc

SEQ ID NO: 43694 - DNA, 15 bp, Homo sapiens
gcattgtgtttctca

SEQ ID NO: 43695 - DNA, 15 bp, Homo sapiens
cattgtgtttctcag

SEQ ID NO: 43696 - DNA, 15 bp, Homo sapiens
attgtgtttctcagc

SEQ ID NO: 43697 - DNA, 15 bp, Homo sapiens
ttgtgtttctcagca

SEQ ID NO: 43698 - DNA, 15 bp, Homo sapiens
tgtgtttctcagcag

SEQ ID NO: 43699 - DNA, 15 bp, Homo sapiens
gtgtttctcagcagc

SEQ ID NO: 43700 - DNA, 15 bp, Homo sapiens
tgtttctcagcagca

SEQ ID NO: 43701 - DNA, 15 bp, Homo sapiens
gtttctcagcagcaa

SEQ ID NO: 43702 - DNA, 15 bp, Homo sapiens
tttctcagcagcaaa

SEQ ID NO: 43703 - DNA, 15 bp, Homo sapiens
ttctcagcagcaaag

SEQ ID NO: 43704 - DNA, 15 bp, Homo sapiens
tctcagcagcaaaga

SEQ ID NO: 43705 - DNA, 15 bp, Homo sapiens
ctcagcagcaaagag

SEQ ID NO: 43706 - DNA, 15 bp, Homo sapiens
tcagcagcaaagagt

SEQ ID NO: 43707 - DNA, 15 bp, Homo sapiens
cagcagcaaagagta

SEQ ID NO: 43708 - DNA, 15 bp, Homo sapiens
agcagcaaagagtag

SEQ ID NO: 43709 - DNA, 15 bp, Homo sapiens
gcagcaaagagtagc

SEQ ID NO: 43710 - DNA, 15 bp, Homo sapiens
cagcaaagagtagca

SEQ ID NO: 43711 - DNA, 15 bp, Homo sapiens
agcaaagagtagcat

SEQ ID NO: 43712 - DNA, 15 bp, Homo sapiens
gcaaagagtagcatc

SEQ ID NO: 43713 - DNA, 15 bp, Homo sapiens
caaagagtagcatcc

SEQ ID NO: 43714 - DNA, 15 bp, Homo sapiens
aaagagtagcatccc

SEQ ID NO: 43715 - DNA, 15 bp, Homo sapiens
aagagtagcatcccc

SEQ ID NO: 43716 - DNA, 15 bp, Homo sapiens
agagtagcatcccca

SEQ ID NO: 43717 - DNA, 15 bp, Homo sapiens
gagtagcatccccag

SEQ ID NO: 43718 - DNA, 15 bp, Homo sapiens
agtagcatccccagc

SEQ ID NO: 43719 - DNA, 15 bp, Homo sapiens
gtagcatccccagcc

SEQ ID NO: 43720 - DNA, 15 bp, Homo sapiens
tagcatccccagccc

SEQ ID NO: 43721 - DNA, 15 bp, Homo sapiens
agcatccccagccct

SEQ ID NO: 43722 - DNA, 15 bp, Homo sapiens
gcatccccagccctg

SEQ ID NO: 43723 - DNA, 15 bp, Homo sapiens
catccccagccctga

SEQ ID NO: 43724 - DNA, 15 bp, Homo sapiens
atccccagccctgac

SEQ ID NO: 43725 - DNA, 15 bp, Homo sapiens
tccccagccctgacc

SEQ ID NO: 43726 - DNA, 15 bp, Homo sapiens
ccccagccctgaccc

SEQ ID NO: 43727 - DNA, 15 bp, Homo sapiens
cccagccctgaccct

SEQ ID NO: 43728 - DNA, 15 bp, Homo sapiens
ccagccctgacccta

SEQ ID NO: 43729 - DNA, 15 bp, Homo sapiens
cagccctgaccctaa

SEQ ID NO: 43730 - DNA, 15 bp, Homo sapiens
agccctgaccctaat

SEQ ID NO: 43731 - DNA, 15 bp, Homo sapiens
gccctgaccctaatt

SEQ ID NO: 43732 - DNA, 15 bp, Homo sapiens
ccctgaccctaattt

SEQ ID NO: 43733 - DNA, 15 bp, Homo sapiens
cctgaccctaatttt

SEQ ID NO: 43734 - DNA, 15 bp, Homo sapiens
ctgaccctaatttta

SEQ ID NO: 43735 - DNA, 15 bp, Homo sapiens
tgaccctaattttat

SEQ ID NO: 43736 - DNA, 15 bp, Homo sapiens
gaccctaattttatt

SEQ ID NO: 43737 - DNA, 15 bp, Homo sapiens
accctaattttattc

SEQ ID NO: 43738 - DNA, 15 bp, Homo sapiens
ccctaattttattcc

SEQ ID NO: 43739 - DNA, 15 bp, Homo sapiens
cctaattttattcct

SEQ ID NO: 43740 - DNA, 15 bp, Homo sapiens
ctaattttattccta

SEQ ID NO: 43741 - DNA, 15 bp, Homo sapiens
taattttattcctac

SEQ ID NO: 43742 - DNA, 15 bp, Homo sapiens
aattttattcctact

SEQ ID NO: 43743 - DNA, 15 bp, Homo sapiens
attttattcctactt

SEQ ID NO: 43744 - DNA, 15 bp, Homo sapiens
ttttattcctacttc

SEQ ID NO: 43745 - DNA, 15 bp, Homo sapiens
tttattcctacttct

SEQ ID NO: 43746 - DNA, 15 bp, Homo sapiens
ttattcctacttctc

SEQ ID NO: 43747 - DNA, 15 bp, Homo sapiens
tattcctacttctca

SEQ ID NO: 43748 - DNA, 15 bp, Homo sapiens
attcctacttctcag

SEQ ID NO: 43749 - DNA, 15 bp, Homo sapiens
ttcctacttctcagt

SEQ ID NO: 43750 - DNA, 15 bp, Homo sapiens
tcctacttctcagtt

SEQ ID NO: 43751 - DNA, 15 bp, Homo sapiens
cctacttctcagttc

SEQ ID NO: 43752 - DNA, 15 bp, Homo sapiens
ctacttctcagttct

SEQ ID NO: 43753 - DNA, 15 bp, Homo sapiens
tacttctcagttctg

SEQ ID NO: 43754 - DNA, 15 bp, Homo sapiens
acttctcagttctga

SEQ ID NO: 43755 - DNA, 15 bp, Homo sapiens
cttctcagttctgag

SEQ ID NO: 43756 - DNA, 15 bp, Homo sapiens
ttctcagttctgagg

SEQ ID NO: 43757 - DNA, 15 bp, Homo sapiens
tctcagttctgaggc

SEQ ID NO: 43758 - DNA, 15 bp, Homo sapiens
ctcagttctgaggca

SEQ ID NO: 43759 - DNA, 15 bp, Homo sapiens
tcagttctgaggcat

SEQ ID NO: 43760 - DNA, 15 bp, Homo sapiens
cagttctgaggcatg

SEQ ID NO: 43761 - DNA, 15 bp, Homo sapiens
agttctgaggcatgg

SEQ ID NO: 43762 - DNA, 15 bp, Homo sapiens
gttctgaggcatgga

SEQ ID NO: 43763 - DNA, 15 bp, Homo sapiens
ttctgaggcatggac

SEQ ID NO: 43764 - DNA, 15 bp, Homo sapiens
tctgaggcatggact

SEQ ID NO: 43765 - DNA, 15 bp, Homo sapiens
ctgaggcatggactt

SEQ ID NO: 43766 - DNA, 15 bp, Homo sapiens
tgaggcatggactta

SEQ ID NO: 43767 - DNA, 15 bp, Homo sapiens
gaggcatggacttac

SEQ ID NO: 43768 - DNA, 15 bp, Homo sapiens
aggcatggacttaca

SEQ ID NO: 43769 - DNA, 15 bp, Homo sapiens
ggcatggacttacaa

SEQ ID NO: 43770 - DNA, 15 bp, Homo sapiens
gcatggacttacaaa

SEQ ID NO: 43771 - DNA, 15 bp, Homo sapiens
catggacttacaaaa

SEQ ID NO: 43772 - DNA, 15 bp, Homo sapiens
atggacttacaaaaa

SEQ ID NO: 43773 - DNA, 15 bp, Homo sapiens
tggacttacaaaaag

SEQ ID NO: 43774 - DNA, 15 bp, Homo sapiens
ggacttacaaaaaga

SEQ ID NO: 43775 - DNA, 15 bp, Homo sapiens
gacttacaaaaagac

SEQ ID NO: 43776 - DNA, 15 bp, Homo sapiens
acttacaaaaagaca

SEQ ID NO: 43777 - DNA, 15 bp, Homo sapiens
cttacaaaaagacac

SEQ ID NO: 43778 - DNA, 15 bp, Homo sapiens
ttacaaaaagacaca

SEQ ID NO: 43779 - DNA, 15 bp, Homo sapiens
tacaaaaagacacat

SEQ ID NO: 43780 - DNA, 15 bp, Homo sapiens
acaaaaagacacata

SEQ ID NO: 43781 - DNA, 15 bp, Homo sapiens
caaaaagacacatac

SEQ ID NO: 43782 - DNA, 15 bp, Homo sapiens
aaaaagacacataca

SEQ ID NO: 43783 - DNA, 15 bp, Homo sapiens
aaaagacacatacat

SEQ ID NO: 43784 - DNA, 15 bp, Homo sapiens
aaagacacatacatg

SEQ ID NO: 43785 - DNA, 15 bp, Homo sapiens
aagacacatacatgc

SEQ ID NO: 43786 - DNA, 15 bp, Homo sapiens
agacacatacatgca

SEQ ID NO: 43787 - DNA, 15 bp, Homo sapiens
gacacatacatgcaa

SEQ ID NO: 43788 - DNA, 15 bp, Homo sapiens
acacatacatgcaat

SEQ ID NO: 43789 - DNA, 15 bp, Homo sapiens
cacatacatgcaatg

SEQ ID NO: 43790 - DNA, 15 bp, Homo sapiens
acatacatgcaatgg

SEQ ID NO: 43791 - DNA, 15 bp, Homo sapiens
catacatgcaatggc

SEQ ID NO: 43792 - DNA, 15 bp, Homo sapiens
atacatgcaatggcc

SEQ ID NO: 43793 - DNA, 15 bp, Homo sapiens
tacatgcaatggcca

SEQ ID NO: 43794 - DNA, 15 bp, Homo sapiens
acatgcaatggccat

SEQ ID NO: 43795 - DNA, 15 bp, Homo sapiens
catgcaatggccatc

SEQ ID NO: 43796 - DNA, 15 bp, Homo sapiens
atgcaatggccatca

SEQ ID NO: 43797 - DNA, 15 bp, Homo sapiens
tgcaatggccatcat

SEQ ID NO: 43798 - DNA, 15 bp, Homo sapiens
gcaatggccatcatg

SEQ ID NO: 43799 - DNA, 15 bp, Homo sapiens
caatggccatcatga

SEQ ID NO: 43800 - DNA, 15 bp, Homo sapiens
aatggccatcatgat

SEQ ID NO: 43801 - DNA, 15 bp, Homo sapiens
atggccatcatgata

SEQ ID NO: 43802 - DNA, 15 bp, Homo sapiens
tggccatcatgatat

SEQ ID NO: 43803 - DNA, 15 bp, Homo sapiens
ggccatcatgatatc

SEQ ID NO: 43804 - DNA, 15 bp, Homo sapiens
gccatcatgatatcc

SEQ ID NO: 43805 - DNA, 15 bp, Homo sapiens
ccatcatgatatcca

SEQ ID NO: 43806 - DNA, 15 bp, Homo sapiens
catcatgatatccaa

SEQ ID NO: 43807 - DNA, 15 bp, Homo sapiens
atcatgatatccaaa

SEQ ID NO: 43808 - DNA, 15 bp, Homo sapiens
tcatgatatccaaat

SEQ ID NO: 43809 - DNA, 15 bp, Homo sapiens
catgatatccaaata

SEQ ID NO: 43810 - DNA, 15 bp, Homo sapiens
atgatatccaaataa

SEQ ID NO: 43811 - DNA, 15 bp, Homo sapiens
tgatatccaaataag

SEQ ID NO: 43812 - DNA, 15 bp, Homo sapiens
gatatccaaataagt

SEQ ID NO: 43813 - DNA, 15 bp, Homo sapiens
atatccaaataagta

SEQ ID NO: 43814 - DNA, 15 bp, Homo sapiens
tatccaaataagtag

SEQ ID NO: 43815 - DNA, 15 bp, Homo sapiens
atccaaataagtagg

SEQ ID NO: 43816 - DNA, 15 bp, Homo sapiens
tccaaataagtagga

SEQ ID NO: 43817 - DNA, 15 bp, Homo sapiens
ccaaataagtaggaa

SEQ ID NO: 43818 - DNA, 15 bp, Homo sapiens
caaataagtaggaaa

SEQ ID NO: 43819 - DNA, 15 bp, Homo sapiens
aaataagtaggaaaa

SEQ ID NO: 43820 - DNA, 15 bp, Homo sapiens
aataagtaggaaaag

SEQ ID NO: 43821 - DNA, 15 bp, Homo sapiens
ataagtaggaaaagg

SEQ ID NO: 43822 - DNA, 15 bp, Homo sapiens
taagtaggaaaagga

SEQ ID NO: 43823 - DNA, 15 bp, Homo sapiens
aagtaggaaaaggaa

SEQ ID NO: 43824 - DNA, 15 bp, Homo sapiens
agtaggaaaaggaac

SEQ ID NO: 43825 - DNA, 15 bp, Homo sapiens
gtaggaaaaggaact

SEQ ID NO: 43826 - DNA, 15 bp, Homo sapiens
taggaaaaggaactg

SEQ ID NO: 43827 - DNA, 15 bp, Homo sapiens
aggaaaaggaactgt

SEQ ID NO: 43828 - DNA, 15 bp, Homo sapiens
ggaaaaggaactgtg

SEQ ID NO: 43829 - DNA, 15 bp, Homo sapiens
gaaaaggaactgtgt

SEQ ID NO: 43830 - DNA, 15 bp, Homo sapiens
aaaaggaactgtgtt

SEQ ID NO: 43831 - DNA, 15 bp, Homo sapiens
aaaggaactgtgttt

SEQ ID NO: 43832 - DNA, 15 bp, Homo sapiens
aaggaactgtgtttc

SEQ ID NO: 43833 - DNA, 15 bp, Homo sapiens
aggaactgtgtttct

SEQ ID NO: 43834 - DNA, 15 bp, Homo sapiens
ggaactgtgtttctg

SEQ ID NO: 43835 - DNA, 15 bp, Homo sapiens
gaactgtgtttctgc

SEQ ID NO: 43836 - DNA, 15 bp, Homo sapiens
aactgtgtttctgcc

SEQ ID NO: 43837 - DNA, 15 bp, Homo sapiens
actgtgtttctgccc

SEQ ID NO: 43838 - DNA, 15 bp, Homo sapiens
ctgtgtttctgccca

SEQ ID NO: 43839 - DNA, 15 bp, Homo sapiens
tgtgtttctgcccat

SEQ ID NO: 43840 - DNA, 15 bp, Homo sapiens
gtgtttctgcccatg

SEQ ID NO: 43841 - DNA, 15 bp, Homo sapiens
tgtttctgcccatga

SEQ ID NO: 43842 - DNA, 15 bp, Homo sapiens
gtttctgcccatgaa

SEQ ID NO: 43843 - DNA, 15 bp, Homo sapiens
tttctgcccatgaag

SEQ ID NO: 43844 - DNA, 15 bp, Homo sapiens
ttctgcccatgaagt

SEQ ID NO: 43845 - DNA, 15 bp, Homo sapiens
tctgcccatgaagtt

SEQ ID NO: 43846 - DNA, 15 bp, Homo sapiens
ctgcccatgaagttt

SEQ ID NO: 43847 - DNA, 15 bp, Homo sapiens
tgcccatgaagtttt

SEQ ID NO: 43848 - DNA, 15 bp, Homo sapiens
gcccatgaagtttta

SEQ ID NO: 43849 - DNA, 15 bp, Homo sapiens
cccatgaagttttac

SEQ ID NO: 43850 - DNA, 15 bp, Homo sapiens
ccatgaagttttact

SEQ ID NO: 43851 - DNA, 15 bp, Homo sapiens
catgaagttttactg

SEQ ID NO: 43852 - DNA, 15 bp, Homo sapiens
atgaagttttactga

SEQ ID NO: 43853 - DNA, 15 bp, Homo sapiens
tgaagttttactgaa

SEQ ID NO: 43854 - DNA, 15 bp, Homo sapiens
gaagttttactgaat

SEQ ID NO: 43855 - DNA, 15 bp, Homo sapiens
aagttttactgaatt

SEQ ID NO: 43856 - DNA, 15 bp, Homo sapiens
agttttactgaattc

SEQ ID NO: 43857 - DNA, 15 bp, Homo sapiens
gttttactgaattca

SEQ ID NO: 43858 - DNA, 15 bp, Homo sapiens
ttttactgaattcaa

SEQ ID NO: 43859 - DNA, 15 bp, Homo sapiens
tttactgaattcaaa

SEQ ID NO: 43860 - DNA, 15 bp, Homo sapiens
ttactgaattcaaag

SEQ ID NO: 43861 - DNA, 15 bp, Homo sapiens
tactgaattcaaagg

SEQ ID NO: 43862 - DNA, 15 bp, Homo sapiens
actgaattcaaaggc

SEQ ID NO: 43863 - DNA, 15 bp, Homo sapiens
ctgaattcaaaggca

SEQ ID NO: 43864 - DNA, 15 bp, Homo sapiens
tgaattcaaaggcaa

SEQ ID NO: 43865 - DNA, 15 bp, Homo sapiens
gaattcaaaggcaac

SEQ ID NO: 43866 - DNA, 15 bp, Homo sapiens
aattcaaaggcaacc

SEQ ID NO: 43867 - DNA, 15 bp, Homo sapiens
attcaaaggcaacct

SEQ ID NO: 43868 - DNA, 15 bp, Homo sapiens
ttcaaaggcaaccta

SEQ ID NO: 43869 - DNA, 15 bp, Homo sapiens
tcaaaggcaacctac

SEQ ID NO: 43870 - DNA, 15 bp, Homo sapiens
caaaggcaacctacc

SEQ ID NO: 43871 - DNA, 15 bp, Homo sapiens
aaaggcaacctacct

SEQ ID NO: 43872 - DNA, 15 bp, Homo sapiens
aaggcaacctacctc

SEQ ID NO: 43873 - DNA, 15 bp, Homo sapiens
aggcaacctacctcc

SEQ ID NO: 43874 - DNA, 15 bp, Homo sapiens
ggcaacctacctcca

SEQ ID NO: 43875 - DNA, 15 bp, Homo sapiens
gcaacctacctccag

SEQ ID NO: 43876 - DNA, 15 bp, Homo sapiens
caacctacctccagt

SEQ ID NO: 43877 - DNA, 15 bp, Homo sapiens
aacctacctccagtc

SEQ ID NO: 43878 - DNA, 15 bp, Homo sapiens
acctacctccagtca

SEQ ID NO: 43879 - DNA, 15 bp, Homo sapiens
cctacctccagtcaa

SEQ ID NO: 43880 - DNA, 15 bp, Homo sapiens
ctacctccagtcaat

SEQ ID NO: 43881 - DNA, 15 bp, Homo sapiens
tacctccagtcaata

SEQ ID NO: 43882 - DNA, 15 bp, Homo sapiens
acctccagtcaatag

SEQ ID NO: 43883 - DNA, 15 bp, Homo sapiens
cctccagtcaatagg

SEQ ID NO: 43884 - DNA, 15 bp, Homo sapiens
ctccagtcaataggt

SEQ ID NO: 43885 - DNA, 15 bp, Homo sapiens
tccagtcaataggtc

SEQ ID NO: 43886 - DNA, 15 bp, Homo sapiens
ccagtcaataggtca

SEQ ID NO: 43887 - DNA, 15 bp, Homo sapiens
cagtcaataggtcag

SEQ ID NO: 43888 - DNA, 15 bp, Homo sapiens
agtcaataggtcaga

SEQ ID NO: 43889 - DNA, 15 bp, Homo sapiens
gtcaataggtcagaa

SEQ ID NO: 43890 - DNA, 15 bp, Homo sapiens
tcaataggtcagaat

SEQ ID NO: 43891 - DNA, 15 bp, Homo sapiens
caataggtcagaatg

SEQ ID NO: 43892 - DNA, 15 bp, Homo sapiens
aataggtcagaatgc

SEQ ID NO: 43893 - DNA, 15 bp, Homo sapiens
ataggtcagaatgca

SEQ ID NO: 43894 - DNA, 15 bp, Homo sapiens
taggtcagaatgcag

SEQ ID NO: 43895 - DNA, 15 bp, Homo sapiens
aggtcagaatgcaga

SEQ ID NO: 43896 - DNA, 15 bp, Homo sapiens
ggtcagaatgcagaa

SEQ ID NO: 43897 - DNA, 15 bp, Homo sapiens
gtcagaatgcagaaa

SEQ ID NO: 43898 - DNA, 15 bp, Homo sapiens
tcagaatgcagaaat

SEQ ID NO: 43899 - DNA, 15 bp, Homo sapiens
cagaatgcagaaatg

SEQ ID NO: 43900 - DNA, 15 bp, Homo sapiens
agaatgcagaaatgg

SEQ ID NO: 43901 - DNA, 15 bp, Homo sapiens
gaatgcagaaatggc

SEQ ID NO: 43902 - DNA, 15 bp, Homo sapiens
aatgcagaaatggct

SEQ ID NO: 43903 - DNA, 15 bp, Homo sapiens
atgcagaaatggctg

SEQ ID NO: 43904 - DNA, 15 bp, Homo sapiens
tgcagaaatggctga

SEQ ID NO: 43905 - DNA, 15 bp, Homo sapiens
gcagaaatggctgaa

SEQ ID NO: 43906 - DNA, 15 bp, Homo sapiens
cagaaatggctgaaa

SEQ ID NO: 43907 - DNA, 15 bp, Homo sapiens
agaaatggctgaaaa

SEQ ID NO: 43908 - DNA, 15 bp, Homo sapiens
gaaatggctgaaaac

SEQ ID NO: 43909 - DNA, 15 bp, Homo sapiens
aaatggctgaaaact

SEQ ID NO: 43910 - DNA, 15 bp, Homo sapiens
aatggctgaaaactc

SEQ ID NO: 43911 - DNA, 15 bp, Homo sapiens
atggctgaaaactct

SEQ ID NO: 43912 - DNA, 15 bp, Homo sapiens
tggctgaaaactctg

SEQ ID NO: 43913 - DNA, 15 bp, Homo sapiens
ggctgaaaactctgg

SEQ ID NO: 43914 - DNA, 15 bp, Homo sapiens
gctgaaaactctggt

SEQ ID NO: 43915 - DNA, 15 bp, Homo sapiens
ctgaaaactctggta

SEQ ID NO: 43916 - DNA, 15 bp, Homo sapiens
tgaaaactctggtat

SEQ ID NO: 43917 - DNA, 15 bp, Homo sapiens
gaaaactctggtatt

SEQ ID NO: 43918 - DNA, 15 bp, Homo sapiens
aaaactctggtattg

SEQ ID NO: 43919 - DNA, 15 bp, Homo sapiens
aaactctggtattga

SEQ ID NO: 43920 - DNA, 15 bp, Homo sapiens
aactctggtattgaa

SEQ ID NO: 43921 - DNA, 15 bp, Homo sapiens
actctggtattgaaa

SEQ ID NO: 43922 - DNA, 15 bp, Homo sapiens
ctctggtattgaaaa

SEQ ID NO: 43923 - DNA, 15 bp, Homo sapiens
tctggtattgaaaag

SEQ ID NO: 43924 - DNA, 15 bp, Homo sapiens
ctggtattgaaaagc

SEQ ID NO: 43925 - DNA, 15 bp, Homo sapiens
tggtattgaaaagca

SEQ ID NO: 43926 - DNA, 15 bp, Homo sapiens
ggtattgaaaagcaa

SEQ ID NO: 43927 - DNA, 15 bp, Homo sapiens
gtattgaaaagcaaa

SEQ ID NO: 43928 - DNA, 15 bp, Homo sapiens
tattgaaaagcaaat

SEQ ID NO: 43929 - DNA, 15 bp, Homo sapiens
attgaaaagcaaatg

SEQ ID NO: 43930 - DNA, 15 bp, Homo sapiens
ttgaaaagcaaatgt

SEQ ID NO: 43931 - DNA, 15 bp, Homo sapiens
tctgctaagctttca

SEQ ID NO: 43932 - DNA, 15 bp, Homo sapiens
ctgctaagctttcaa

SEQ ID NO: 43933 - DNA, 15 bp, Homo sapiens
tgctaagctttcaat

SEQ ID NO: 43934 - DNA, 15 bp, Homo sapiens
gctaagctttcaatg

SEQ ID NO: 43935 - DNA, 15 bp, Homo sapiens
ctaagctttcaatga

SEQ ID NO: 43936 - DNA, 15 bp, Homo sapiens
taagctttcaatgag

SEQ ID NO: 43937 - DNA, 15 bp, Homo sapiens
aagctttcaatgagt

SEQ ID NO: 43938 - DNA, 15 bp, Homo sapiens
agctttcaatgagta

SEQ ID NO: 43939 - DNA, 15 bp, Homo sapiens
gctttcaatgagtaa

SEQ ID NO: 43940 - DNA, 15 bp, Homo sapiens
ctttcaatgagtaat

SEQ ID NO: 43941 - DNA, 15 bp, Homo sapiens
tttcaatgagtaatt

SEQ ID NO: 43942 - DNA, 15 bp, Homo sapiens
ttcaatgagtaattt

SEQ ID NO: 43943 - DNA, 15 bp, Homo sapiens
tcaatgagtaatttt

SEQ ID NO: 43944 - DNA, 15 bp, Homo sapiens
caatgagtaatttta

SEQ ID NO: 43945 - DNA, 15 bp, Homo sapiens
aatgagtaattttat

SEQ ID NO: 43946 - DNA, 15 bp, Homo sapiens
atgagtaattttata

SEQ ID NO: 43947 - DNA, 15 bp, Homo sapiens
tgagtaattttatat

SEQ ID NO: 43948 - DNA, 15 bp, Homo sapiens
gagtaattttatata

SEQ ID NO: 43949 - DNA, 15 bp, Homo sapiens
agtaattttatatac

SEQ ID NO: 43950 - DNA, 15 bp, Homo sapiens
gtaattttatatact

SEQ ID NO: 43951 - DNA, 15 bp, Homo sapiens
taattttatatactg

SEQ ID NO: 43952 - DNA, 15 bp, Homo sapiens
aattttatatactgt

SEQ ID NO: 43953 - DNA, 15 bp, Homo sapiens
attttatatactgta

SEQ ID NO: 43954 - DNA, 15 bp, Homo sapiens
ttttatatactgtat

SEQ ID NO: 43955 - DNA, 15 bp, Homo sapiens
tttatatactgtatt

SEQ ID NO: 43956 - DNA, 15 bp, Homo sapiens
ttatatactgtatta

SEQ ID NO: 43957 - DNA, 15 bp, Homo sapiens
tatatactgtattag

SEQ ID NO: 43958 - DNA, 15 bp, Homo sapiens
atatactgtattagg

SEQ ID NO: 43959 - DNA, 15 bp, Homo sapiens
tatactgtattagga

SEQ ID NO: 43960 - DNA, 15 bp, Homo sapiens
atactgtattaggaa

SEQ ID NO: 43961 - DNA, 15 bp, Homo sapiens
tactgtattaggaaa

SEQ ID NO: 43962 - DNA, 15 bp, Homo sapiens
actgtattaggaaat

SEQ ID NO: 43963 - DNA, 15 bp, Homo sapiens
ctgtattaggaaata

SEQ ID NO: 43964 - DNA, 15 bp, Homo sapiens
tgtattaggaaataa

SEQ ID NO: 43965 - DNA, 15 bp, Homo sapiens
gtattaggaaataat

SEQ ID NO: 43966 - DNA, 15 bp, Homo sapiens
tattaggaaataata

SEQ ID NO: 43967 - DNA, 15 bp, Homo sapiens
attaggaaataataa

SEQ ID NO: 43968 - DNA, 15 bp, Homo sapiens
ttaggaaataataaa

SEQ ID NO: 43969 - DNA, 15 bp, Homo sapiens
taggaaataataaaa

SEQ ID NO: 43970 - DNA, 15 bp, Homo sapiens
aggaaataataaaag

SEQ ID NO: 43971 - DNA, 15 bp, Homo sapiens
ggaaataataaaaga

SEQ ID NO: 43972 - DNA, 15 bp, Homo sapiens
gaaataataaaagat

SEQ ID NO: 43973 - DNA, 15 bp, Homo sapiens
aaataataaaagatt

SEQ ID NO: 43974 - DNA, 15 bp, Homo sapiens
aataataaaagatta

SEQ ID NO: 43975 - DNA, 15 bp, Homo sapiens
ataataaaagattaa

SEQ ID NO: 43976 - DNA, 15 bp, Homo sapiens
taataaaagattaag

SEQ ID NO: 43977 - DNA, 15 bp, Homo sapiens
aataaaagattaagt

SEQ ID NO: 43978 - DNA, 15 bp, Homo sapiens
ataaaagattaagta

SEQ ID NO: 43979 - DNA, 15 bp, Homo sapiens
taaaagattaagtaa

SEQ ID NO: 43980 - DNA, 15 bp, Homo sapiens
aaaagattaagtaag

SEQ ID NO: 43981 - DNA, 15 bp, Homo sapiens
aaagattaagtaaga

SEQ ID NO: 43982 - DNA, 15 bp, Homo sapiens
aagattaagtaagag

SEQ ID NO: 43983 - DNA, 15 bp, Homo sapiens
agattaagtaagagc

SEQ ID NO: 43984 - DNA, 15 bp, Homo sapiens
gattaagtaagagct

SEQ ID NO: 43985 - DNA, 15 bp, Homo sapiens
attaagtaagagctt

SEQ ID NO: 43986 - DNA, 15 bp, Homo sapiens
ttaagtaagagcttc

SEQ ID NO: 43987 - DNA, 15 bp, Homo sapiens
taagtaagagcttcc

SEQ ID NO: 43988 - DNA, 15 bp, Homo sapiens
aagtaagagcttcca

SEQ ID NO: 43989 - DNA, 15 bp, Homo sapiens
agtaagagcttccag

SEQ ID NO: 43990 - DNA, 15 bp, Homo sapiens
gtaagagcttccagg

SEQ ID NO: 43991 - DNA, 15 bp, Homo sapiens
taagagcttccagga

SEQ ID NO: 43992 - DNA, 15 bp, Homo sapiens
aagagcttccaggac

SEQ ID NO: 43993 - DNA, 15 bp, Homo sapiens
agagcttccaggaca

SEQ ID NO: 43994 - DNA, 15 bp, Homo sapiens
gagcttccaggacaa

SEQ ID NO: 43995 - DNA, 15 bp, Homo sapiens
agcttccaggacaat

SEQ ID NO: 43996 - DNA, 15 bp, Homo sapiens
gcttccaggacaatt

SEQ ID NO: 43997 - DNA, 15 bp, Homo sapiens
cttccaggacaattc

SEQ ID NO: 43998 - DNA, 15 bp, Homo sapiens
ttccaggacaattct

SEQ ID NO: 43999 - DNA, 15 bp, Homo sapiens
tccaggacaattctt

SEQ ID NO: 44000 - DNA, 15 bp, Homo sapiens
ccaggacaattcttc

SEQ ID NO: 44001 - DNA, 15 bp, Homo sapiens
caggacaattcttca

SEQ ID NO: 44002 - DNA, 15 bp, Homo sapiens
aggacaattcttcat

SEQ ID NO: 44003 - DNA, 15 bp, Homo sapiens
ggacaattcttcatt

SEQ ID NO: 44004 - DNA, 15 bp, Homo sapiens
gacaattcttcattt

SEQ ID NO: 44005 - DNA, 15 bp, Homo sapiens
acaattcttcatttt

SEQ ID NO: 44006 - DNA, 15 bp, Homo sapiens
caattcttcattttc

SEQ ID NO: 44007 - DNA, 15 bp, Homo sapiens
aattcttcattttca

SEQ ID NO: 44008 - DNA, 15 bp, Homo sapiens
attcttcattttcaa

SEQ ID NO: 44009 - DNA, 15 bp, Homo sapiens
ttcttcattttcaac

SEQ ID NO: 44010 - DNA, 15 bp, Homo sapiens
tcttcattttcaacc

SEQ ID NO: 44011 - DNA, 15 bp, Homo sapiens
cttcattttcaacct

SEQ ID NO: 44012 - DNA, 15 bp, Homo sapiens
ttcattttcaacctt

SEQ ID NO: 44013 - DNA, 15 bp, Homo sapiens
tcattttcaaccttc

SEQ ID NO: 44014 - DNA, 15 bp, Homo sapiens
cattttcaaccttcg

SEQ ID NO: 44015 - DNA, 15 bp, Homo sapiens
attttcaaccttcgg

SEQ ID NO: 44016 - DNA, 15 bp, Homo sapiens
ttttcaaccttcgga

SEQ ID NO: 44017 - DNA, 15 bp, Homo sapiens
tttcaaccttcggat

SEQ ID NO: 44018 - DNA, 15 bp, Homo sapiens
ttcaaccttcggatg

SEQ ID NO: 44019 - DNA, 15 bp, Homo sapiens
tcaaccttcggatga

SEQ ID NO: 44020 - DNA, 15 bp, Homo sapiens
caaccttcggatgac

SEQ ID NO: 44021 - DNA, 15 bp, Homo sapiens
aaccttcggatgact

SEQ ID NO: 44022 - DNA, 15 bp, Homo sapiens
accttcggatgactc

SEQ ID NO: 44023 - DNA, 15 bp, Homo sapiens
ccttcggatgactct

SEQ ID NO: 44024 - DNA, 15 bp, Homo sapiens
cttcggatgactctt

SEQ ID NO: 44025 - DNA, 15 bp, Homo sapiens
ttcggatgactcttt

SEQ ID NO: 44026 - DNA, 15 bp, Homo sapiens
tcggatgactcttta

SEQ ID NO: 44027 - DNA, 15 bp, Homo sapiens
cggatgactctttat

SEQ ID NO: 44028 - DNA, 15 bp, Homo sapiens
ggatgactctttatc

SEQ ID NO: 44029 - DNA, 15 bp, Homo sapiens
gatgactctttatca

SEQ ID NO: 44030 - DNA, 15 bp, Homo sapiens
atgactctttatcac

SEQ ID NO: 44031 - DNA, 15 bp, Homo sapiens
tgactctttatcaca

SEQ ID NO: 44032 - DNA, 15 bp, Homo sapiens
gactctttatcacac

SEQ ID NO: 44033 - DNA, 15 bp, Homo sapiens
actctttatcacaca

SEQ ID NO: 44034 - DNA, 15 bp, Homo sapiens
ctctttatcacacat

SEQ ID NO: 44035 - DNA, 15 bp, Homo sapiens
tctttatcacacata

SEQ ID NO: 44036 - DNA, 15 bp, Homo sapiens
ctttatcacacataa

SEQ ID NO: 44037 - DNA, 15 bp, Homo sapiens
tttatcacacataag

SEQ ID NO: 44038 - DNA, 15 bp, Homo sapiens
ttatcacacataaga

SEQ ID NO: 44039 - DNA, 15 bp, Homo sapiens
tatcacacataagat

SEQ ID NO: 44040 - DNA, 15 bp, Homo sapiens
atcacacataagata

SEQ ID NO: 44041 - DNA, 15 bp, Homo sapiens
tcacacataagataa

SEQ ID NO: 44042 - DNA, 15 bp, Homo sapiens
cacacataagataaa

SEQ ID NO: 44043 - DNA, 15 bp, Homo sapiens
acacataagataaag

SEQ ID NO: 44044 - DNA, 15 bp, Homo sapiens
cacataagataaaga

SEQ ID NO: 44045 - DNA, 15 bp, Homo sapiens
acataagataaagag

SEQ ID NO: 44046 - DNA, 15 bp, Homo sapiens
cataagataaagagg

SEQ ID NO: 44047 - DNA, 15 bp, Homo sapiens
ataagataaagaggc

SEQ ID NO: 44048 - DNA, 15 bp, Homo sapiens
taagataaagaggct

SEQ ID NO: 44049 - DNA, 15 bp, Homo sapiens
aagataaagaggctg

SEQ ID NO: 44050 - DNA, 15 bp, Homo sapiens
agataaagaggctgt

SEQ ID NO: 44051 - DNA, 15 bp, Homo sapiens
gataaagaggctgtg

SEQ ID NO: 44052 - DNA, 15 bp, Homo sapiens
ataaagaggctgtgt

SEQ ID NO: 44053 - DNA, 15 bp, Homo sapiens
taaagaggctgtgta

SEQ ID NO: 44054 - DNA, 15 bp, Homo sapiens
aaagaggctgtgtaa

SEQ ID NO: 44055 - DNA, 15 bp, Homo sapiens
aagaggctgtgtaat

SEQ ID NO: 44056 - DNA, 15 bp, Homo sapiens
agaggctgtgtaata

SEQ ID NO: 44057 - DNA, 15 bp, Homo sapiens
gaggctgtgtaatat

SEQ ID NO: 44058 - DNA, 15 bp, Homo sapiens
aggctgtgtaatatt

SEQ ID NO: 44059 - DNA, 15 bp, Homo sapiens
ggctgtgtaatattg

SEQ ID NO: 44060 - DNA, 15 bp, Homo sapiens
gctgtgtaatattgc

SEQ ID NO: 44061 - DNA, 15 bp, Homo sapiens
ctgtgtaatattgct

SEQ ID NO: 44062 - DNA, 15 bp, Homo sapiens
tgtgtaatattgcta

SEQ ID NO: 44063 - DNA, 15 bp, Homo sapiens
gtgtaatattgctaa

SEQ ID NO: 44064 - DNA, 15 bp, Homo sapiens
tgtaatattgctaag

SEQ ID NO: 44065 - DNA, 15 bp, Homo sapiens
gtaatattgctaagc

SEQ ID NO: 44066 - DNA, 15 bp, Homo sapiens
taatattgctaagca

SEQ ID NO: 44067 - DNA, 15 bp, Homo sapiens
aatattgctaagcag

SEQ ID NO: 44068 - DNA, 15 bp, Homo sapiens
atattgctaagcaga

SEQ ID NO: 44069 - DNA, 15 bp, Homo sapiens
tattgctaagcagat

SEQ ID NO: 44070 - DNA, 15 bp, Homo sapiens
attgctaagcagatt

SEQ ID NO: 44071 - DNA, 15 bp, Homo sapiens
ttgctaagcagatta

SEQ ID NO: 44072 - DNA, 15 bp, Homo sapiens
tgctaagcagattat

SEQ ID NO: 44073 - DNA, 15 bp, Homo sapiens
gctaagcagattata

SEQ ID NO: 44074 - DNA, 15 bp, Homo sapiens
ctaagcagattatat

SEQ ID NO: 44075 - DNA, 15 bp, Homo sapiens
taagcagattatata

SEQ ID NO: 44076 - DNA, 15 bp, Homo sapiens
aagcagattatatat

SEQ ID NO: 44077 - DNA, 15 bp, Homo sapiens
agcagattatatatt

SEQ ID NO: 44078 - DNA, 15 bp, Homo sapiens
gcagattatatattt

SEQ ID NO: 44079 - DNA, 15 bp, Homo sapiens
cagattatatattta

SEQ ID NO: 44080 - DNA, 15 bp, Homo sapiens
agattatatatttat

SEQ ID NO: 44081 - DNA, 15 bp, Homo sapiens
gattatatatttatt

SEQ ID NO: 44082 - DNA, 15 bp, Homo sapiens
attatatatttattt

SEQ ID NO: 44083 - DNA, 15 bp, Homo sapiens
ttatatatttattta

SEQ ID NO: 44084 - DNA, 15 bp, Homo sapiens
tatatatttatttat

SEQ ID NO: 44085 - DNA, 15 bp, Homo sapiens
atatatttatttata

SEQ ID NO: 44086 - DNA, 15 bp, Homo sapiens
tatatttatttatac

SEQ ID NO: 44087 - DNA, 15 bp, Homo sapiens
atatttatttatact

SEQ ID NO: 44088 - DNA, 15 bp, Homo sapiens
tatttatttatactt

SEQ ID NO: 44089 - DNA, 15 bp, Homo sapiens
atttatttatactta

SEQ ID NO: 44090 - DNA, 15 bp, Homo sapiens
tttatttatacttaa

SEQ ID NO: 44091 - DNA, 15 bp, Homo sapiens
ttatttatacttaat

SEQ ID NO: 44092 - DNA, 15 bp, Homo sapiens
tatttatacttaata

SEQ ID NO: 44093 - DNA, 15 bp, Homo sapiens
atttatacttaataa

SEQ ID NO: 44094 - DNA, 15 bp, Homo sapiens
tttatacttaataaa

SEQ ID NO: 44095 - DNA, 15 bp, Homo sapiens
ttatacttaataaat

SEQ ID NO: 44096 - DNA, 15 bp, Homo sapiens
tatacttaataaatt

SEQ ID NO: 44097 - DNA, 15 bp, Homo sapiens
atacttaataaattc

SEQ ID NO: 44098 - DNA, 15 bp, Homo sapiens
tacttaataaattca

SEQ ID NO: 44099 - DNA, 15 bp, Homo sapiens
acttaataaattcat

SEQ ID NO: 44100 - DNA, 15 bp, Homo sapiens
cttaataaattcatt

SEQ ID NO: 44101 - DNA, 15 bp, Homo sapiens
ttaataaattcattg

SEQ ID NO: 44102 - DNA, 15 bp, Homo sapiens
taataaattcattga

SEQ ID NO: 44103 - DNA, 15 bp, Homo sapiens
aataaattcattgat

SEQ ID NO: 44104 - DNA, 15 bp, Homo sapiens
ataaattcattgatg

SEQ ID NO: 44105 - DNA, 15 bp, Homo sapiens
taaattcattgatgc

SEQ ID NO: 44106 - DNA, 15 bp, Homo sapiens
aaattcattgatgct

SEQ ID NO: 44107 - DNA, 15 bp, Homo sapiens
aattcattgatgctg

SEQ ID NO: 44108 - DNA, 15 bp, Homo sapiens
attcattgatgctgt

SEQ ID NO: 44109 - DNA, 15 bp, Homo sapiens
ttcattgatgctgtc

SEQ ID NO: 44110 - DNA, 15 bp, Homo sapiens
tcattgatgctgtct

SEQ ID NO: 44111 - DNA, 15 bp, Homo sapiens
cattgatgctgtcta

SEQ ID NO: 44112 - DNA, 15 bp, Homo sapiens
attgatgctgtctaa

SEQ ID NO: 44113 - DNA, 15 bp, Homo sapiens
ttgatgctgtctaat

SEQ ID NO: 44114 - DNA, 15 bp, Homo sapiens
tgatgctgtctaatt

SEQ ID NO: 44115 - DNA, 15 bp, Homo sapiens
gatgctgtctaattc

SEQ ID NO: 44116 - DNA, 15 bp, Homo sapiens
atgctgtctaattct

SEQ ID NO: 44117 - DNA, 15 bp, Homo sapiens
tgctgtctaattctg

SEQ ID NO: 44118 - DNA, 15 bp, Homo sapiens
gctgtctaattctgc

SEQ ID NO: 44119 - DNA, 15 bp, Homo sapiens
ctgtctaattctgct

SEQ ID NO: 44120 - DNA, 15 bp, Homo sapiens
tgtctaattctgctt

SEQ ID NO: 44121 - DNA, 15 bp, Homo sapiens
gtctaattctgcttt

SEQ ID NO: 44122 - DNA, 15 bp, Homo sapiens
tctaattctgcttta

SEQ ID NO: 44123 - DNA, 15 bp, Homo sapiens
ctaattctgctttaa

SEQ ID NO: 44124 - DNA, 15 bp, Homo sapiens
taattctgctttaag

SEQ ID NO: 44125 - DNA, 15 bp, Homo sapiens
aattctgctttaagg

SEQ ID NO: 44126 - DNA, 15 bp, Homo sapiens
attctgctttaaggc

SEQ ID NO: 44127 - DNA, 15 bp, Homo sapiens
ttctgctttaaggct

SEQ ID NO: 44128 - DNA, 15 bp, Homo sapiens
tctgctttaaggctt

SEQ ID NO: 44129 - DNA, 15 bp, Homo sapiens
ctgctttaaggctta

SEQ ID NO: 44130 - DNA, 15 bp, Homo sapiens
tgctttaaggcttac

SEQ ID NO: 44131 - DNA, 15 bp, Homo sapiens
gctttaaggcttaca

SEQ ID NO: 44132 - DNA, 15 bp, Homo sapiens
ctttaaggcttacag

SEQ ID NO: 44133 - DNA, 15 bp, Homo sapiens
tttaaggcttacagc

SEQ ID NO: 44134 - DNA, 15 bp, Homo sapiens
ttaaggcttacagcc

SEQ ID NO: 44135 - DNA, 15 bp, Homo sapiens
taaggcttacagcca

SEQ ID NO: 44136 - DNA, 15 bp, Homo sapiens
aaggcttacagccat

SEQ ID NO: 44137 - DNA, 15 bp, Homo sapiens
aggcttacagccatt

SEQ ID NO: 44138 - DNA, 15 bp, Homo sapiens
ggcttacagccatta

SEQ ID NO: 44139 - DNA, 15 bp, Homo sapiens
gcttacagccattaa

SEQ ID NO: 44140 - DNA, 15 bp, Homo sapiens
cttacagccattaat

SEQ ID NO: 44141 - DNA, 15 bp, Homo sapiens
ttacagccattaatt

SEQ ID NO: 44142 - DNA, 15 bp, Homo sapiens
tacagccattaattc

SEQ ID NO: 44143 - DNA, 15 bp, Homo sapiens
acagccattaattca

SEQ ID NO: 44144 - DNA, 15 bp, Homo sapiens
cagccattaattcaa

SEQ ID NO: 44145 - DNA, 15 bp, Homo sapiens
agccattaattcaac

SEQ ID NO: 44146 - DNA, 15 bp, Homo sapiens
gccattaattcaacc

SEQ ID NO: 44147 - DNA, 15 bp, Homo sapiens
ccattaattcaacca

SEQ ID NO: 44148 - DNA, 15 bp, Homo sapiens
cattaattcaaccac

SEQ ID NO: 44149 - DNA, 15 bp, Homo sapiens
attaattcaaccaca

SEQ ID NO: 44150 - DNA, 15 bp, Homo sapiens
ttaattcaaccacat

SEQ ID NO: 44151 - DNA, 15 bp, Homo sapiens
taattcaaccacatc

SEQ ID NO: 44152 - DNA, 15 bp, Homo sapiens
aattcaaccacatct

SEQ ID NO: 44153 - DNA, 15 bp, Homo sapiens
attcaaccacatcta

SEQ ID NO: 44154 - DNA, 15 bp, Homo sapiens
ttcaaccacatctat

SEQ ID NO: 44155 - DNA, 15 bp, Homo sapiens
tcaaccacatctata

SEQ ID NO: 44156 - DNA, 15 bp, Homo sapiens
caaccacatctataa

SEQ ID NO: 44157 - DNA, 15 bp, Homo sapiens
aaccacatctataaa

SEQ ID NO: 44158 - DNA, 15 bp, Homo sapiens
accacatctataaaa

SEQ ID NO: 44159 - DNA, 15 bp, Homo sapiens
ccacatctataaaat

SEQ ID NO: 44160 - DNA, 15 bp, Homo sapiens
cacatctataaaatg

SEQ ID NO: 44161 - DNA, 15 bp, Homo sapiens
acatctataaaatgc

SEQ ID NO: 44162 - DNA, 15 bp, Homo sapiens
catctataaaatgct

SEQ ID NO: 44163 - DNA, 15 bp, Homo sapiens
atctataaaatgcta

SEQ ID NO: 44164 - DNA, 15 bp, Homo sapiens
tctataaaatgctag

SEQ ID NO: 44165 - DNA, 15 bp, Homo sapiens
ctataaaatgctagg

SEQ ID NO: 44166 - DNA, 15 bp, Homo sapiens
tataaaatgctagga

SEQ ID NO: 44167 - DNA, 15 bp, Homo sapiens
ataaaatgctaggaa

SEQ ID NO: 44168 - DNA, 15 bp, Homo sapiens
taaaatgctaggaag

SEQ ID NO: 44169 - DNA, 15 bp, Homo sapiens
aaaatgctaggaagg

SEQ ID NO: 44170 - DNA, 15 bp, Homo sapiens
aaatgctaggaaggc

SEQ ID NO: 44171 - DNA, 15 bp, Homo sapiens
aatgctaggaaggct

SEQ ID NO: 44172 - DNA, 15 bp, Homo sapiens
atgctaggaaggctt

SEQ ID NO: 44173 - DNA, 15 bp, Homo sapiens
tgctaggaaggcttt

SEQ ID NO: 44174 - DNA, 15 bp, Homo sapiens
gctaggaaggctttc

SEQ ID NO: 44175 - DNA, 15 bp, Homo sapiens
ctaggaaggctttca

SEQ ID NO: 44176 - DNA, 15 bp, Homo sapiens
taggaaggctttcat

SEQ ID NO: 44177 - DNA, 15 bp, Homo sapiens
aggaaggctttcata

SEQ ID NO: 44178 - DNA, 15 bp, Homo sapiens
ggaaggctttcatag

SEQ ID NO: 44179 - DNA, 15 bp, Homo sapiens
gaaggctttcatagc

SEQ ID NO: 44180 - DNA, 15 bp, Homo sapiens
aaggctttcatagcc

SEQ ID NO: 44181 - DNA, 15 bp, Homo sapiens
aggctttcatagccc

SEQ ID NO: 44182 - DNA, 15 bp, Homo sapiens
ggctttcatagcccc

SEQ ID NO: 44183 - DNA, 15 bp, Homo sapiens
gctttcatagcccca

SEQ ID NO: 44184 - DNA, 15 bp, Homo sapiens
ctttcatagccccac

SEQ ID NO: 44185 - DNA, 15 bp, Homo sapiens
tttcatagccccact

SEQ ID NO: 44186 - DNA, 15 bp, Homo sapiens
ttcatagccccactg

SEQ ID NO: 44187 - DNA, 15 bp, Homo sapiens
tcatagccccactgt

SEQ ID NO: 44188 - DNA, 15 bp, Homo sapiens
catagccccactgtc

SEQ ID NO: 44189 - DNA, 15 bp, Homo sapiens
atagccccactgtca

SEQ ID NO: 44190 - DNA, 15 bp, Homo sapiens
tagccccactgtcag

SEQ ID NO: 44191 - DNA, 15 bp, Homo sapiens
agccccactgtcagg

SEQ ID NO: 44192 - DNA, 15 bp, Homo sapiens
gccccactgtcagga

SEQ ID NO: 44193 - DNA, 15 bp, Homo sapiens
ccccactgtcaggaa

SEQ ID NO: 44194 - DNA, 15 bp, Homo sapiens
cccactgtcaggaaa

SEQ ID NO: 44195 - DNA, 15 bp, Homo sapiens
ccactgtcaggaaat

SEQ ID NO: 44196 - DNA, 15 bp, Homo sapiens
cactgtcaggaaatt

SEQ ID NO: 44197 - DNA, 15 bp, Homo sapiens
actgtcaggaaattc

SEQ ID NO: 44198 - DNA, 15 bp, Homo sapiens
ctgtcaggaaattca

SEQ ID NO: 44199 - DNA, 15 bp, Homo sapiens
tgtcaggaaattcaa

SEQ ID NO: 44200 - DNA, 15 bp, Homo sapiens
gtcaggaaattcaat

SEQ ID NO: 44201 - DNA, 15 bp, Homo sapiens
tcaggaaattcaata

SEQ ID NO: 44202 - DNA, 15 bp, Homo sapiens
caggaaattcaatat

SEQ ID NO: 44203 - DNA, 15 bp, Homo sapiens
aggaaattcaatata

SEQ ID NO: 44204 - DNA, 15 bp, Homo sapiens
ggaaattcaatatag

SEQ ID NO: 44205 - DNA, 15 bp, Homo sapiens
gaaattcaatatagt

SEQ ID NO: 44206 - DNA, 15 bp, Homo sapiens
aaattcaatatagta

SEQ ID NO: 44207 - DNA, 15 bp, Homo sapiens
aattcaatatagtac

SEQ ID NO: 44208 - DNA, 15 bp, Homo sapiens
attcaatatagtaca

SEQ ID NO: 44209 - DNA, 15 bp, Homo sapiens
ttcaatatagtacat

SEQ ID NO: 44210 - DNA, 15 bp, Homo sapiens
tcaatatagtacata

SEQ ID NO: 44211 - DNA, 15 bp, Homo sapiens
caatatagtacatag

SEQ ID NO: 44212 - DNA, 15 bp, Homo sapiens
aatatagtacataga

SEQ ID NO: 44213 - DNA, 15 bp, Homo sapiens
atatagtacatagaa

SEQ ID NO: 44214 - DNA, 15 bp, Homo sapiens
tatagtacatagaac

SEQ ID NO: 44215 - DNA, 15 bp, Homo sapiens
atagtacatagaact

SEQ ID NO: 44216 - DNA, 15 bp, Homo sapiens
tagtacatagaacta

SEQ ID NO: 44217 - DNA, 15 bp, Homo sapiens
agtacatagaactaa

SEQ ID NO: 44218 - DNA, 15 bp, Homo sapiens
gtacatagaactaaa

SEQ ID NO: 44219 - DNA, 15 bp, Homo sapiens
tacatagaactaaaa

SEQ ID NO: 44220 - DNA, 15 bp, Homo sapiens
acatagaactaaaaa

SEQ ID NO: 44221 - DNA, 15 bp, Homo sapiens
catagaactaaaaag

SEQ ID NO: 44222 - DNA, 15 bp, Homo sapiens
atagaactaaaaaga

SEQ ID NO: 44223 - DNA, 15 bp, Homo sapiens
tagaactaaaaagaa

SEQ ID NO: 44224 - DNA, 15 bp, Homo sapiens
agaactaaaaagaaa

SEQ ID NO: 44225 - DNA, 15 bp, Homo sapiens
gaactaaaaagaaaa

SEQ ID NO: 44226 - DNA, 15 bp, Homo sapiens
aactaaaaagaaaat

SEQ ID NO: 44227 - DNA, 15 bp, Homo sapiens
actaaaaagaaaatc

SEQ ID NO: 44228 - DNA, 15 bp, Homo sapiens
ctaaaaagaaaatca

SEQ ID NO: 44229 - DNA, 15 bp, Homo sapiens
taaaaagaaaatcaa

SEQ ID NO: 44230 - DNA, 15 bp, Homo sapiens
aaaaagaaaatcaat

SEQ ID NO: 44231 - DNA, 15 bp, Homo sapiens
aaaagaaaatcaatg

SEQ ID NO: 44232 - DNA, 15 bp, Homo sapiens
aaagaaaatcaatga

SEQ ID NO: 44233 - DNA, 15 bp, Homo sapiens
aagaaaatcaatgaa

SEQ ID NO: 44234 - DNA, 15 bp, Homo sapiens
agaaaatcaatgaag

SEQ ID NO: 44235 - DNA, 15 bp, Homo sapiens
gaaaatcaatgaagt

SEQ ID NO: 44236 - DNA, 15 bp, Homo sapiens
aaaatcaatgaagta

SEQ ID NO: 44237 - DNA, 15 bp, Homo sapiens
aaatcaatgaagtag

SEQ ID NO: 44238 - DNA, 15 bp, Homo sapiens
aatcaatgaagtaga

SEQ ID NO: 44239 - DNA, 15 bp, Homo sapiens
atcaatgaagtagat

SEQ ID NO: 44240 - DNA, 15 bp, Homo sapiens
tcaatgaagtagata

SEQ ID NO: 44241 - DNA, 15 bp, Homo sapiens
caatgaagtagatat

SEQ ID NO: 44242 - DNA, 15 bp, Homo sapiens
aatgaagtagatatc

SEQ ID NO: 44243 - DNA, 15 bp, Homo sapiens
atgaagtagatatca

SEQ ID NO: 44244 - DNA, 15 bp, Homo sapiens
tgaagtagatatcaa

SEQ ID NO: 44245 - DNA, 15 bp, Homo sapiens
gaagtagatatcaag

SEQ ID NO: 44246 - DNA, 15 bp, Homo sapiens
aagtagatatcaagt

SEQ ID NO: 44247 - DNA, 15 bp, Homo sapiens
agtagatatcaagtt

SEQ ID NO: 44248 - DNA, 15 bp, Homo sapiens
gtagatatcaagttt

SEQ ID NO: 44249 - DNA, 15 bp, Homo sapiens
tagatatcaagttta

SEQ ID NO: 44250 - DNA, 15 bp, Homo sapiens
agatatcaagtttag

SEQ ID NO: 44251 - DNA, 15 bp, Homo sapiens
gatatcaagtttagc

SEQ ID NO: 44252 - DNA, 15 bp, Homo sapiens
atatcaagtttagct

SEQ ID NO: 44253 - DNA, 15 bp, Homo sapiens
tatcaagtttagctt

SEQ ID NO: 44254 - DNA, 15 bp, Homo sapiens
atcaagtttagcttt

SEQ ID NO: 44255 - DNA, 15 bp, Homo sapiens
tcaagtttagcttta

SEQ ID NO: 44256 - DNA, 15 bp, Homo sapiens
caagtttagctttaa

SEQ ID NO: 44257 - DNA, 15 bp, Homo sapiens
aagtttagctttaag

SEQ ID NO: 44258 - DNA, 15 bp, Homo sapiens
agtttagctttaagt

SEQ ID NO: 44259 - DNA, 15 bp, Homo sapiens
gtttagctttaagtg

SEQ ID NO: 44260 - DNA, 15 bp, Homo sapiens
tttagctttaagtgt

SEQ ID NO: 44261 - DNA, 15 bp, Homo sapiens
ttagctttaagtgtg

SEQ ID NO: 44262 - DNA, 15 bp, Homo sapiens
tagctttaagtgtga

SEQ ID NO: 44263 - DNA, 15 bp, Homo sapiens
agctttaagtgtgac

SEQ ID NO: 44264 - DNA, 15 bp, Homo sapiens
gctttaagtgtgact

SEQ ID NO: 44265 - DNA, 15 bp, Homo sapiens
ctttaagtgtgactc

SEQ ID NO: 44266 - DNA, 15 bp, Homo sapiens
tttaagtgtgactca

SEQ ID NO: 44267 - DNA, 15 bp, Homo sapiens
ttaagtgtgactcac

SEQ ID NO: 44268 - DNA, 15 bp, Homo sapiens
taagtgtgactcaca

SEQ ID NO: 44269 - DNA, 15 bp, Homo sapiens
aagtgtgactcacaa

SEQ ID NO: 44270 - DNA, 15 bp, Homo sapiens
agtgtgactcacaag

SEQ ID NO: 44271 - DNA, 15 bp, Homo sapiens
gtgtgactcacaagt

SEQ ID NO: 44272 - DNA, 15 bp, Homo sapiens
tgtgactcacaagtc

SEQ ID NO: 44273 - DNA, 15 bp, Homo sapiens
gtgactcacaagtct

SEQ ID NO: 44274 - DNA, 15 bp, Homo sapiens
tgactcacaagtctt

SEQ ID NO: 44275 - DNA, 15 bp, Homo sapiens
gactcacaagtctta

SEQ ID NO: 44276 - DNA, 15 bp, Homo sapiens
actcacaagtcttag

SEQ ID NO: 44277 - DNA, 15 bp, Homo sapiens
ctcacaagtcttaga

SEQ ID NO: 44278 - DNA, 15 bp, Homo sapiens
tcacaagtcttagac

SEQ ID NO: 44279 - DNA, 15 bp, Homo sapiens
cacaagtcttagaca

SEQ ID NO: 44280 - DNA, 15 bp, Homo sapiens
acaagtcttagacat

SEQ ID NO: 44281 - DNA, 15 bp, Homo sapiens
caagtcttagacatt

SEQ ID NO: 44282 - DNA, 15 bp, Homo sapiens
aagtcttagacattt

SEQ ID NO: 44283 - DNA, 15 bp, Homo sapiens
agtcttagacatttc

SEQ ID NO: 44284 - DNA, 15 bp, Homo sapiens
gtcttagacatttca

SEQ ID NO: 44285 - DNA, 15 bp, Homo sapiens
tcttagacatttcac

SEQ ID NO: 44286 - DNA, 15 bp, Homo sapiens
cttagacatttcact

SEQ ID NO: 44287 - DNA, 15 bp, Homo sapiens
ttagacatttcactg

SEQ ID NO: 44288 - DNA, 15 bp, Homo sapiens
tagacatttcactga

SEQ ID NO: 44289 - DNA, 15 bp, Homo sapiens
agacatttcactgaa

SEQ ID NO: 44290 - DNA, 15 bp, Homo sapiens
gacatttcactgaaa

SEQ ID NO: 44291 - DNA, 15 bp, Homo sapiens
acatttcactgaaag

SEQ ID NO: 44292 - DNA, 15 bp, Homo sapiens
catttcactgaaaga

SEQ ID NO: 44293 - DNA, 15 bp, Homo sapiens
atttcactgaaagaa

SEQ ID NO: 44294 - DNA, 15 bp, Homo sapiens
tttcactgaaagaat

SEQ ID NO: 44295 - DNA, 15 bp, Homo sapiens
ttcactgaaagaatg

SEQ ID NO: 44296 - DNA, 15 bp, Homo sapiens
tcactgaaagaatgt

SEQ ID NO: 44297 - DNA, 15 bp, Homo sapiens
cactgaaagaatgtc

SEQ ID NO: 44298 - DNA, 15 bp, Homo sapiens
actgaaagaatgtcc

SEQ ID NO: 44299 - DNA, 15 bp, Homo sapiens
ctgaaagaatgtcca

SEQ ID NO: 44300 - DNA, 15 bp, Homo sapiens
tgaaagaatgtccat

SEQ ID NO: 44301 - DNA, 15 bp, Homo sapiens
gaaagaatgtccata

SEQ ID NO: 44302 - DNA, 15 bp, Homo sapiens
aaagaatgtccataa

SEQ ID NO: 44303 - DNA, 15 bp, Homo sapiens
aagaatgtccataac

SEQ ID NO: 44304 - DNA, 15 bp, Homo sapiens
agaatgtccataaca

SEQ ID NO: 44305 - DNA, 15 bp, Homo sapiens
gaatgtccataacaa

SEQ ID NO: 44306 - DNA, 15 bp, Homo sapiens
aatgtccataacaac

SEQ ID NO: 44307 - DNA, 15 bp, Homo sapiens
atgtccataacaaca

SEQ ID NO: 44308 - DNA, 15 bp, Homo sapiens
tgtccataacaacat

SEQ ID NO: 44309 - DNA, 15 bp, Homo sapiens
gtccataacaacatg

SEQ ID NO: 44310 - DNA, 15 bp, Homo sapiens
tccataacaacatgc

SEQ ID NO: 44311 - DNA, 15 bp, Homo sapiens
ccataacaacatgct

SEQ ID NO: 44312 - DNA, 15 bp, Homo sapiens
cataacaacatgctc

SEQ ID NO: 44313 - DNA, 15 bp, Homo sapiens
ataacaacatgctct

SEQ ID NO: 44314 - DNA, 15 bp, Homo sapiens
taacaacatgctctt

SEQ ID NO: 44315 - DNA, 15 bp, Homo sapiens
aacaacatgctcttt

SEQ ID NO: 44316 - DNA, 15 bp, Homo sapiens
acaacatgctctttt

SEQ ID NO: 44317 - DNA, 15 bp, Homo sapiens
caacatgctctttta

SEQ ID NO: 44318 - DNA, 15 bp, Homo sapiens
aacatgctcttttac

SEQ ID NO: 44319 - DNA, 15 bp, Homo sapiens
acatgctcttttact

SEQ ID NO: 44320 - DNA, 15 bp, Homo sapiens
catgctcttttactc

SEQ ID NO: 44321 - DNA, 15 bp, Homo sapiens
atgctcttttactct

SEQ ID NO: 44322 - DNA, 15 bp, Homo sapiens
tgctcttttactctt

SEQ ID NO: 44323 - DNA, 15 bp, Homo sapiens
gctcttttactcttg

SEQ ID NO: 44324 - DNA, 15 bp, Homo sapiens
ctcttttactcttgc

SEQ ID NO: 44325 - DNA, 15 bp, Homo sapiens
tcttttactcttgct

SEQ ID NO: 44326 - DNA, 15 bp, Homo sapiens
cttttactcttgctg

SEQ ID NO: 44327 - DNA, 15 bp, Homo sapiens
ttttactcttgctgt

SEQ ID NO: 44328 - DNA, 15 bp, Homo sapiens
tttactcttgctgta

SEQ ID NO: 44329 - DNA, 15 bp, Homo sapiens
ttactcttgctgtag

SEQ ID NO: 44330 - DNA, 15 bp, Homo sapiens
tactcttgctgtagt

SEQ ID NO: 44331 - DNA, 15 bp, Homo sapiens
actcttgctgtagtc

SEQ ID NO: 44332 - DNA, 15 bp, Homo sapiens
ctcttgctgtagtca

SEQ ID NO: 44333 - DNA, 15 bp, Homo sapiens
tcttgctgtagtcat

SEQ ID NO: 44334 - DNA, 15 bp, Homo sapiens
cttgctgtagtcata

SEQ ID NO: 44335 - DNA, 15 bp, Homo sapiens
ttgctgtagtcataa

SEQ ID NO: 44336 - DNA, 15 bp, Homo sapiens
tgctgtagtcataac

SEQ ID NO: 44337 - DNA, 15 bp, Homo sapiens
gctgtagtcataact

SEQ ID NO: 44338 - DNA, 15 bp, Homo sapiens
ctgtagtcataactt

SEQ ID NO: 44339 - DNA, 15 bp, Homo sapiens
tgtagtcataactta

SEQ ID NO: 44340 - DNA, 15 bp, Homo sapiens
gtagtcataacttac

SEQ ID NO: 44341 - DNA, 15 bp, Homo sapiens
tagtcataacttaca

SEQ ID NO: 44342 - DNA, 15 bp, Homo sapiens
agtcataacttacat

SEQ ID NO: 44343 - DNA, 15 bp, Homo sapiens
gtcataacttacatt

SEQ ID NO: 44344 - DNA, 15 bp, Homo sapiens
tcataacttacattt

SEQ ID NO: 44345 - DNA, 15 bp, Homo sapiens
cataacttacatttg

SEQ ID NO: 44346 - DNA, 15 bp, Homo sapiens
ataacttacatttgt

SEQ ID NO: 44347 - DNA, 15 bp, Homo sapiens
taacttacatttgtc

SEQ ID NO: 44348 - DNA, 15 bp, Homo sapiens
aacttacatttgtct

SEQ ID NO: 44349 - DNA, 15 bp, Homo sapiens
acttacatttgtcta

SEQ ID NO: 44350 - DNA, 15 bp, Homo sapiens
cttacatttgtctaa

SEQ ID NO: 44351 - DNA, 15 bp, Homo sapiens
ttacatttgtctaag

SEQ ID NO: 44352 - DNA, 15 bp, Homo sapiens
tacatttgtctaaga

SEQ ID NO: 44353 - DNA, 15 bp, Homo sapiens
acatttgtctaagag

SEQ ID NO: 44354 - DNA, 15 bp, Homo sapiens
catttgtctaagaga

SEQ ID NO: 44355 - DNA, 15 bp, Homo sapiens
atttgtctaagagac

SEQ ID NO: 44356 - DNA, 15 bp, Homo sapiens
tttgtctaagagact

SEQ ID NO: 44357 - DNA, 15 bp, Homo sapiens
ttgtctaagagacta

SEQ ID NO: 44358 - DNA, 15 bp, Homo sapiens
tgtctaagagactat

SEQ ID NO: 44359 - DNA, 15 bp, Homo sapiens
gtctaagagactata

SEQ ID NO: 44360 - DNA, 15 bp, Homo sapiens
tctaagagactatag

SEQ ID NO: 44361 - DNA, 15 bp, Homo sapiens
ctaagagactataga

SEQ ID NO: 44362 - DNA, 15 bp, Homo sapiens
taagagactatagaa

SEQ ID NO: 44363 - DNA, 15 bp, Homo sapiens
aagagactatagaac

SEQ ID NO: 44364 - DNA, 15 bp, Homo sapiens
agagactatagaaca

SEQ ID NO: 44365 - DNA, 15 bp, Homo sapiens
gagactatagaacat

SEQ ID NO: 44366 - DNA, 15 bp, Homo sapiens
agactatagaacatt

SEQ ID NO: 44367 - DNA, 15 bp, Homo sapiens
gactatagaacattc

SEQ ID NO: 44368 - DNA, 15 bp, Homo sapiens
actatagaacattca

SEQ ID NO: 44369 - DNA, 15 bp, Homo sapiens
ctatagaacattcac

SEQ ID NO: 44370 - DNA, 15 bp, Homo sapiens
tatagaacattcaca

SEQ ID NO: 44371 - DNA, 15 bp, Homo sapiens
atagaacattcacag

SEQ ID NO: 44372 - DNA, 15 bp, Homo sapiens
tagaacattcacagg

SEQ ID NO: 44373 - DNA, 15 bp, Homo sapiens
agaacattcacaggc

SEQ ID NO: 44374 - DNA, 15 bp, Homo sapiens
gaacattcacaggcg

SEQ ID NO: 44375 - DNA, 15 bp, Homo sapiens
aacattcacaggcgt

SEQ ID NO: 44376 - DNA, 15 bp, Homo sapiens
acattcacaggcgtc

SEQ ID NO: 44377 - DNA, 15 bp, Homo sapiens
cattcacaggcgtca

SEQ ID NO: 44378 - DNA, 15 bp, Homo sapiens
attcacaggcgtcat

SEQ ID NO: 44379 - DNA, 15 bp, Homo sapiens
ttcacaggcgtcatc

SEQ ID NO: 44380 - DNA, 15 bp, Homo sapiens
tcacaggcgtcatct

SEQ ID NO: 44381 - DNA, 15 bp, Homo sapiens
cacaggcgtcatcta

SEQ ID NO: 44382 - DNA, 15 bp, Homo sapiens
acaggcgtcatctaa

SEQ ID NO: 44383 - DNA, 15 bp, Homo sapiens
caggcgtcatctaat

SEQ ID NO: 44384 - DNA, 15 bp, Homo sapiens
aggcgtcatctaatt

SEQ ID NO: 44385 - DNA, 15 bp, Homo sapiens
ggcgtcatctaattt

SEQ ID NO: 44386 - DNA, 15 bp, Homo sapiens
gcgtcatctaatttg

SEQ ID NO: 44387 - DNA, 15 bp, Homo sapiens
cgtcatctaatttga

SEQ ID NO: 44388 - DNA, 15 bp, Homo sapiens
gtcatctaatttgat

SEQ ID NO: 44389 - DNA, 15 bp, Homo sapiens
tcatctaatttgatt

SEQ ID NO: 44390 - DNA, 15 bp, Homo sapiens
catctaatttgattt

SEQ ID NO: 44391 - DNA, 15 bp, Homo sapiens
atctaatttgatttt

SEQ ID NO: 44392 - DNA, 15 bp, Homo sapiens
tctaatttgattttt

SEQ ID NO: 44393 - DNA, 15 bp, Homo sapiens
ctaatttgattttta

SEQ ID NO: 44394 - DNA, 15 bp, Homo sapiens
taatttgatttttac

SEQ ID NO: 44395 - DNA, 15 bp, Homo sapiens
aatttgatttttaca

SEQ ID NO: 44396 - DNA, 15 bp, Homo sapiens
atttgatttttacaa

SEQ ID NO: 44397 - DNA, 15 bp, Homo sapiens
tttgatttttacaag

SEQ ID NO: 44398 - DNA, 15 bp, Homo sapiens
ttgatttttacaagg

SEQ ID NO: 44399 - DNA, 15 bp, Homo sapiens
tgatttttacaagga

SEQ ID NO: 44400 - DNA, 15 bp, Homo sapiens
gatttttacaaggag

SEQ ID NO: 44401 - DNA, 15 bp, Homo sapiens
atttttacaaggaga

SEQ ID NO: 44402 - DNA, 15 bp, Homo sapiens
tttttacaaggagac

SEQ ID NO: 44403 - DNA, 15 bp, Homo sapiens
ttttacaaggagaca

SEQ ID NO: 44404 - DNA, 15 bp, Homo sapiens
tttacaaggagacag

SEQ ID NO: 44405 - DNA, 15 bp, Homo sapiens
ttacaaggagacagg

SEQ ID NO: 44406 - DNA, 15 bp, Homo sapiens
tacaaggagacagga

SEQ ID NO: 44407 - DNA, 15 bp, Homo sapiens
acaaggagacaggat

SEQ ID NO: 44408 - DNA, 15 bp, Homo sapiens
caaggagacaggatg

SEQ ID NO: 44409 - DNA, 15 bp, Homo sapiens
aaggagacaggatgg

SEQ ID NO: 44410 - DNA, 15 bp, Homo sapiens
aggagacaggatggg

SEQ ID NO: 44411 - DNA, 15 bp, Homo sapiens
ggagacaggatgggt

SEQ ID NO: 44412 - DNA, 15 bp, Homo sapiens
gagacaggatgggta

SEQ ID NO: 44413 - DNA, 15 bp, Homo sapiens
agacaggatgggtat

SEQ ID NO: 44414 - DNA, 15 bp, Homo sapiens
gacaggatgggtatt

SEQ ID NO: 44415 - DNA, 15 bp, Homo sapiens
acaggatgggtatta

SEQ ID NO: 44416 - DNA, 15 bp, Homo sapiens
caggatgggtattat

SEQ ID NO: 44417 - DNA, 15 bp, Homo sapiens
aggatgggtattatt

SEQ ID NO: 44418 - DNA, 15 bp, Homo sapiens
ggatgggtattatta

SEQ ID NO: 44419 - DNA, 15 bp, Homo sapiens
gatgggtattattat

SEQ ID NO: 44420 - DNA, 15 bp, Homo sapiens
atgggtattattatc

SEQ ID NO: 44421 - DNA, 15 bp, Homo sapiens
tgggtattattatcc

SEQ ID NO: 44422 - DNA, 15 bp, Homo sapiens
gggtattattatccc

SEQ ID NO: 44423 - DNA, 15 bp, Homo sapiens
ggtattattatcccc

SEQ ID NO: 44424 - DNA, 15 bp, Homo sapiens
gtattattatcccca

SEQ ID NO: 44425 - DNA, 15 bp, Homo sapiens
tattattatccccat

SEQ ID NO: 44426 - DNA, 15 bp, Homo sapiens
attattatccccatt

SEQ ID NO: 44427 - DNA, 15 bp, Homo sapiens
ttattatccccatta

SEQ ID NO: 44428 - DNA, 15 bp, Homo sapiens
tattatccccattat

SEQ ID NO: 44429 - DNA, 15 bp, Homo sapiens
attatccccattata

SEQ ID NO: 44430 - DNA, 15 bp, Homo sapiens
ttatccccattatat

SEQ ID NO: 44431 - DNA, 15 bp, Homo sapiens
tatccccattatata

SEQ ID NO: 44432 - DNA, 15 bp, Homo sapiens
atccccattatatag

SEQ ID NO: 44433 - DNA, 15 bp, Homo sapiens
tccccattatataga

SEQ ID NO: 44434 - DNA, 15 bp, Homo sapiens
ccccattatatagat

SEQ ID NO: 44435 - DNA, 15 bp, Homo sapiens
cccattatatagatg

SEQ ID NO: 44436 - DNA, 15 bp, Homo sapiens
ccattatatagatga

SEQ ID NO: 44437 - DNA, 15 bp, Homo sapiens
cattatatagatgag

SEQ ID NO: 44438 - DNA, 15 bp, Homo sapiens
attatatagatgagg

SEQ ID NO: 44439 - DNA, 15 bp, Homo sapiens
ttatatagatgaggc

SEQ ID NO: 44440 - DNA, 15 bp, Homo sapiens
tatatagatgaggca

SEQ ID NO: 44441 - DNA, 15 bp, Homo sapiens
atatagatgaggcaa

SEQ ID NO: 44442 - DNA, 15 bp, Homo sapiens
tatagatgaggcaat

SEQ ID NO: 44443 - DNA, 15 bp, Homo sapiens
atagatgaggcaatt

SEQ ID NO: 44444 - DNA, 15 bp, Homo sapiens
tagatgaggcaatta

SEQ ID NO: 44445 - DNA, 15 bp, Homo sapiens
agatgaggcaattat

SEQ ID NO: 44446 - DNA, 15 bp, Homo sapiens
gatgaggcaattatg

SEQ ID NO: 44447 - DNA, 15 bp, Homo sapiens
atgaggcaattatgc

SEQ ID NO: 44448 - DNA, 15 bp, Homo sapiens
tgaggcaattatgcg

SEQ ID NO: 44449 - DNA, 15 bp, Homo sapiens
gaggcaattatgcgt

SEQ ID NO: 44450 - DNA, 15 bp, Homo sapiens
aggcaattatgcgtc

SEQ ID NO: 44451 - DNA, 15 bp, Homo sapiens
ggcaattatgcgtca

SEQ ID NO: 44452 - DNA, 15 bp, Homo sapiens
gcaattatgcgtcag

SEQ ID NO: 44453 - DNA, 15 bp, Homo sapiens
caattatgcgtcaga

SEQ ID NO: 44454 - DNA, 15 bp, Homo sapiens
aattatgcgtcagag

SEQ ID NO: 44455 - DNA, 15 bp, Homo sapiens
attatgcgtcagaga

SEQ ID NO: 44456 - DNA, 15 bp, Homo sapiens
ttatgcgtcagagag

SEQ ID NO: 44457 - DNA, 15 bp, Homo sapiens
tatgcgtcagagagg

SEQ ID NO: 44458 - DNA, 15 bp, Homo sapiens
atgcgtcagagaggt

SEQ ID NO: 44459 - DNA, 15 bp, Homo sapiens
tgcgtcagagaggtt

SEQ ID NO: 44460 - DNA, 15 bp, Homo sapiens
gcgtcagagaggtta

SEQ ID NO: 44461 - DNA, 15 bp, Homo sapiens
cgtcagagaggttag

SEQ ID NO: 44462 - DNA, 15 bp, Homo sapiens
gtcagagaggttagg

SEQ ID NO: 44463 - DNA, 15 bp, Homo sapiens
tcagagaggttaggt

SEQ ID NO: 44464 - DNA, 15 bp, Homo sapiens
cagagaggttaggta

SEQ ID NO: 44465 - DNA, 15 bp, Homo sapiens
agagaggttaggtaa

SEQ ID NO: 44466 - DNA, 15 bp, Homo sapiens
gagaggttaggtaac

SEQ ID NO: 44467 - DNA, 15 bp, Homo sapiens
agaggttaggtaacc

SEQ ID NO: 44468 - DNA, 15 bp, Homo sapiens
gaggttaggtaacct

SEQ ID NO: 44469 - DNA, 15 bp, Homo sapiens
aggttaggtaacctg

SEQ ID NO: 44470 - DNA, 15 bp, Homo sapiens
ggttaggtaacctgt

SEQ ID NO: 44471 - DNA, 15 bp, Homo sapiens
gttaggtaacctgtc

SEQ ID NO: 44472 - DNA, 15 bp, Homo sapiens
ttaggtaacctgtca

SEQ ID NO: 44473 - DNA, 15 bp, Homo sapiens
taggtaacctgtcaa

SEQ ID NO: 44474 - DNA, 15 bp, Homo sapiens
aggtaacctgtcaaa

SEQ ID NO: 44475 - DNA, 15 bp, Homo sapiens
ggtaacctgtcaaat

SEQ ID NO: 44476 - DNA, 15 bp, Homo sapiens
gtaacctgtcaaatg

SEQ ID NO: 44477 - DNA, 15 bp, Homo sapiens
taacctgtcaaatgc

SEQ ID NO: 44478 - DNA, 15 bp, Homo sapiens
aacctgtcaaatgcc

SEQ ID NO: 44479 - DNA, 15 bp, Homo sapiens
acctgtcaaatgcca

SEQ ID NO: 44480 - DNA, 15 bp, Homo sapiens
cctgtcaaatgccat

SEQ ID NO: 44481 - DNA, 15 bp, Homo sapiens
ctgtcaaatgccata

SEQ ID NO: 44482 - DNA, 15 bp, Homo sapiens
tgtcaaatgccataa

SEQ ID NO: 44483 - DNA, 15 bp, Homo sapiens
gtcaaatgccataaa

SEQ ID NO: 44484 - DNA, 15 bp, Homo sapiens
tcaaatgccataaag

SEQ ID NO: 44485 - DNA, 15 bp, Homo sapiens
caaatgccataaagc

SEQ ID NO: 44486 - DNA, 15 bp, Homo sapiens
aaatgccataaagct

SEQ ID NO: 44487 - DNA, 15 bp, Homo sapiens
aatgccataaagcta

SEQ ID NO: 44488 - DNA, 15 bp, Homo sapiens
atgccataaagctag

SEQ ID NO: 44489 - DNA, 15 bp, Homo sapiens
tgccataaagctagt

SEQ ID NO: 44490 - DNA, 15 bp, Homo sapiens
gccataaagctagta

SEQ ID NO: 44491 - DNA, 15 bp, Homo sapiens
ccataaagctagtag

SEQ ID NO: 44492 - DNA, 15 bp, Homo sapiens
cataaagctagtagg

SEQ ID NO: 44493 - DNA, 15 bp, Homo sapiens
ataaagctagtaggt

SEQ ID NO: 44494 - DNA, 15 bp, Homo sapiens
taaagctagtaggtc

SEQ ID NO: 44495 - DNA, 15 bp, Homo sapiens
aaagctagtaggtca

SEQ ID NO: 44496 - DNA, 15 bp, Homo sapiens
aagctagtaggtcac

SEQ ID NO: 44497 - DNA, 15 bp, Homo sapiens
agctagtaggtcacc

SEQ ID NO: 44498 - DNA, 15 bp, Homo sapiens
gctagtaggtcacct

SEQ ID NO: 44499 - DNA, 15 bp, Homo sapiens
ctagtaggtcacctg

SEQ ID NO: 44500 - DNA, 15 bp, Homo sapiens
tagtaggtcacctgt

SEQ ID NO: 44501 - DNA, 15 bp, Homo sapiens
agtaggtcacctgtc

SEQ ID NO: 44502 - DNA, 15 bp, Homo sapiens
gtaggtcacctgtct

SEQ ID NO: 44503 - DNA, 15 bp, Homo sapiens
taggtcacctgtctc

SEQ ID NO: 44504 - DNA, 15 bp, Homo sapiens
aggtcacctgtctcc

SEQ ID NO: 44505 - DNA, 15 bp, Homo sapiens
ggtcacctgtctcct

SEQ ID NO: 44506 - DNA, 15 bp, Homo sapiens
gtcacctgtctcctg

SEQ ID NO: 44507 - DNA, 15 bp, Homo sapiens
tcacctgtctcctga

SEQ ID NO: 44508 - DNA, 15 bp, Homo sapiens
cacctgtctcctgaa

SEQ ID NO: 44509 - DNA, 15 bp, Homo sapiens
acctgtctcctgaac

SEQ ID NO: 44510 - DNA, 15 bp, Homo sapiens
cctgtctcctgaacc

SEQ ID NO: 44511 - DNA, 15 bp, Homo sapiens
ctgtctcctgaacca

SEQ ID NO: 44512 - DNA, 15 bp, Homo sapiens
tgtctcctgaaccaa

SEQ ID NO: 44513 - DNA, 15 bp, Homo sapiens
gtctcctgaaccaag

SEQ ID NO: 44514 - DNA, 15 bp, Homo sapiens
tctcctgaaccaagc

SEQ ID NO: 44515 - DNA, 15 bp, Homo sapiens
ctcctgaaccaagct

SEQ ID NO: 44516 - DNA, 15 bp, Homo sapiens
tcctgaaccaagctt

SEQ ID NO: 44517 - DNA, 15 bp, Homo sapiens
cctgaaccaagcttt

SEQ ID NO: 44518 - DNA, 15 bp, Homo sapiens
ctgaaccaagctttt

SEQ ID NO: 44519 - DNA, 15 bp, Homo sapiens
tgaaccaagctttta

SEQ ID NO: 44520 - DNA, 15 bp, Homo sapiens
gaaccaagcttttac

SEQ ID NO: 44521 - DNA, 15 bp, Homo sapiens
aaccaagcttttacc

SEQ ID NO: 44522 - DNA, 15 bp, Homo sapiens
accaagcttttacca

SEQ ID NO: 44523 - DNA, 15 bp, Homo sapiens
ccaagcttttaccat

SEQ ID NO: 44524 - DNA, 15 bp, Homo sapiens
caagcttttaccatc

SEQ ID NO: 44525 - DNA, 15 bp, Homo sapiens
aagcttttaccatca

SEQ ID NO: 44526 - DNA, 15 bp, Homo sapiens
agcttttaccatcag

SEQ ID NO: 44527 - DNA, 15 bp, Homo sapiens
gcttttaccatcagg

SEQ ID NO: 44528 - DNA, 15 bp, Homo sapiens
cttttaccatcagga

SEQ ID NO: 44529 - DNA, 15 bp, Homo sapiens
ttttaccatcaggat

SEQ ID NO: 44530 - DNA, 15 bp, Homo sapiens
tttaccatcaggatg

SEQ ID NO: 44531 - DNA, 15 bp, Homo sapiens
ttaccatcaggatgt

SEQ ID NO: 44532 - DNA, 15 bp, Homo sapiens
taccatcaggatgtg

SEQ ID NO: 44533 - DNA, 15 bp, Homo sapiens
accatcaggatgtgt

SEQ ID NO: 44534 - DNA, 15 bp, Homo sapiens
ccatcaggatgtgtt

SEQ ID NO: 44535 - DNA, 15 bp, Homo sapiens
catcaggatgtgttg

SEQ ID NO: 44536 - DNA, 15 bp, Homo sapiens
atcaggatgtgttgc

SEQ ID NO: 44537 - DNA, 15 bp, Homo sapiens
tcaggatgtgttgcc

SEQ ID NO: 44538 - DNA, 15 bp, Homo sapiens
caggatgtgttgcca

SEQ ID NO: 44539 - DNA, 15 bp, Homo sapiens
aggatgtgttgccag

SEQ ID NO: 44540 - DNA, 15 bp, Homo sapiens
ggatgtgttgccagt

SEQ ID NO: 44541 - DNA, 15 bp, Homo sapiens
gatgtgttgccagtt

SEQ ID NO: 44542 - DNA, 15 bp, Homo sapiens
atgtgttgccagttt

SEQ ID NO: 44543 - DNA, 15 bp, Homo sapiens
tgtgttgccagtttt

SEQ ID NO: 44544 - DNA, 15 bp, Homo sapiens
gtgttgccagtttta

SEQ ID NO: 44545 - DNA, 15 bp, Homo sapiens
tgttgccagttttag

SEQ ID NO: 44546 - DNA, 15 bp, Homo sapiens
gttgccagttttaga

SEQ ID NO: 44547 - DNA, 15 bp, Homo sapiens
ttgccagttttagaa

SEQ ID NO: 44548 - DNA, 15 bp, Homo sapiens
tgccagttttagaat

SEQ ID NO: 44549 - DNA, 15 bp, Homo sapiens
gccagttttagaata

SEQ ID NO: 44550 - DNA, 15 bp, Homo sapiens
ccagttttagaatat

SEQ ID NO: 44551 - DNA, 15 bp, Homo sapiens
cagttttagaatatc

SEQ ID NO: 44552 - DNA, 15 bp, Homo sapiens
agttttagaatatca

SEQ ID NO: 44553 - DNA, 15 bp, Homo sapiens
gttttagaatatcag

SEQ ID NO: 44554 - DNA, 15 bp, Homo sapiens
ttttagaatatcagc

SEQ ID NO: 44555 - DNA, 15 bp, Homo sapiens
tttagaatatcagcc

SEQ ID NO: 44556 - DNA, 15 bp, Homo sapiens
ttagaatatcagcca

SEQ ID NO: 44557 - DNA, 15 bp, Homo sapiens
tagaatatcagccac

SEQ ID NO: 44558 - DNA, 15 bp, Homo sapiens
agaatatcagccaca

SEQ ID NO: 44559 - DNA, 15 bp, Homo sapiens
gaatatcagccacag

SEQ ID NO: 44560 - DNA, 15 bp, Homo sapiens
aatatcagccacaga

SEQ ID NO: 44561 - DNA, 15 bp, Homo sapiens
atatcagccacagag

SEQ ID NO: 44562 - DNA, 15 bp, Homo sapiens
tatcagccacagaga

SEQ ID NO: 44563 - DNA, 15 bp, Homo sapiens
atcagccacagagaa

SEQ ID NO: 44564 - DNA, 15 bp, Homo sapiens
tcagccacagagaag

SEQ ID NO: 44565 - DNA, 15 bp, Homo sapiens
cagccacagagaaga

SEQ ID NO: 44566 - DNA, 15 bp, Homo sapiens
agccacagagaagag

SEQ ID NO: 44567 - DNA, 15 bp, Homo sapiens
gccacagagaagaga

SEQ ID NO: 44568 - DNA, 15 bp, Homo sapiens
ccacagagaagagag

SEQ ID NO: 44569 - DNA, 15 bp, Homo sapiens
cacagagaagagagt

SEQ ID NO: 44570 - DNA, 15 bp, Homo sapiens
acagagaagagagtg

SEQ ID NO: 44571 - DNA, 15 bp, Homo sapiens
cagagaagagagtgg

SEQ ID NO: 44572 - DNA, 15 bp, Homo sapiens
agagaagagagtggc

SEQ ID NO: 44573 - DNA, 15 bp, Homo sapiens
gagaagagagtggct

SEQ ID NO: 44574 - DNA, 15 bp, Homo sapiens
agaagagagtggctg

SEQ ID NO: 44575 - DNA, 15 bp, Homo sapiens
gaagagagtggctgt

SEQ ID NO: 44576 - DNA, 15 bp, Homo sapiens
aagagagtggctgtg

SEQ ID NO: 44577 - DNA, 15 bp, Homo sapiens
agagagtggctgtga

SEQ ID NO: 44578 - DNA, 15 bp, Homo sapiens
gagagtggctgtgac

SEQ ID NO: 44579 - DNA, 15 bp, Homo sapiens
agagtggctgtgaca

SEQ ID NO: 44580 - DNA, 15 bp, Homo sapiens
gagtggctgtgacaa

SEQ ID NO: 44581 - DNA, 15 bp, Homo sapiens
agtggctgtgacaac

SEQ ID NO: 44582 - DNA, 15 bp, Homo sapiens
gtggctgtgacaacg

SEQ ID NO: 44583 - DNA, 15 bp, Homo sapiens
tggctgtgacaacga

SEQ ID NO: 44584 - DNA, 15 bp, Homo sapiens
ggctgtgacaacgaa

SEQ ID NO: 44585 - DNA, 15 bp, Homo sapiens
gctgtgacaacgaag

SEQ ID NO: 44586 - DNA, 15 bp, Homo sapiens
ctgtgacaacgaagg

SEQ ID NO: 44587 - DNA, 15 bp, Homo sapiens
tgtgacaacgaagga

SEQ ID NO: 44588 - DNA, 15 bp, Homo sapiens
gtgacaacgaaggag

SEQ ID NO: 44589 - DNA, 15 bp, Homo sapiens
tgacaacgaaggagc

SEQ ID NO: 44590 - DNA, 15 bp, Homo sapiens
gacaacgaaggagct

SEQ ID NO: 44591 - DNA, 15 bp, Homo sapiens
acaacgaaggagctt

SEQ ID NO: 44592 - DNA, 15 bp, Homo sapiens
caacgaaggagctta

SEQ ID NO: 44593 - DNA, 15 bp, Homo sapiens
aacgaaggagcttac

SEQ ID NO: 44594 - DNA, 15 bp, Homo sapiens
acgaaggagcttaca

SEQ ID NO: 44595 - DNA, 15 bp, Homo sapiens
cgaaggagcttacaa

SEQ ID NO: 44596 - DNA, 15 bp, Homo sapiens
gaaggagcttacaaa

SEQ ID NO: 44597 - DNA, 15 bp, Homo sapiens
aaggagcttacaaaa

SEQ ID NO: 44598 - DNA, 15 bp, Homo sapiens
aggagcttacaaaat

SEQ ID NO: 44599 - DNA, 15 bp, Homo sapiens
ggagcttacaaaatg

SEQ ID NO: 44600 - DNA, 15 bp, Homo sapiens
gagcttacaaaatgt

SEQ ID NO: 44601 - DNA, 15 bp, Homo sapiens
agcttacaaaatgtg

SEQ ID NO: 44602 - DNA, 15 bp, Homo sapiens
gcttacaaaatgtgg

SEQ ID NO: 44603 - DNA, 15 bp, Homo sapiens
cttacaaaatgtgga

SEQ ID NO: 44604 - DNA, 15 bp, Homo sapiens
ttacaaaatgtggac

SEQ ID NO: 44605 - DNA, 15 bp, Homo sapiens
tacaaaatgtggaca

SEQ ID NO: 44606 - DNA, 15 bp, Homo sapiens
acaaaatgtggacac

SEQ ID NO: 44607 - DNA, 15 bp, Homo sapiens
caaaatgtggacact

SEQ ID NO: 44608 - DNA, 15 bp, Homo sapiens
aaaatgtggacactg

SEQ ID NO: 44609 - DNA, 15 bp, Homo sapiens
aaatgtggacactgc

SEQ ID NO: 44610 - DNA, 15 bp, Homo sapiens
aatgtggacactgca

SEQ ID NO: 44611 - DNA, 15 bp, Homo sapiens
atgtggacactgcag

SEQ ID NO: 44612 - DNA, 15 bp, Homo sapiens
tgtggacactgcagc

SEQ ID NO: 44613 - DNA, 15 bp, Homo sapiens
gtggacactgcagct

SEQ ID NO: 44614 - DNA, 15 bp, Homo sapiens
tggacactgcagcta

SEQ ID NO: 44615 - DNA, 15 bp, Homo sapiens
ggacactgcagctat

SEQ ID NO: 44616 - DNA, 15 bp, Homo sapiens
gacactgcagctatg

SEQ ID NO: 44617 - DNA, 15 bp, Homo sapiens
acactgcagctatgt

SEQ ID NO: 44618 - DNA, 15 bp, Homo sapiens
cactgcagctatgtg

SEQ ID NO: 44619 - DNA, 15 bp, Homo sapiens
actgcagctatgtgt

SEQ ID NO: 44620 - DNA, 15 bp, Homo sapiens
ctgcagctatgtgtg

SEQ ID NO: 44621 - DNA, 15 bp, Homo sapiens
tgcagctatgtgtgt

SEQ ID NO: 44622 - DNA, 15 bp, Homo sapiens
gcagctatgtgtgtc

SEQ ID NO: 44623 - DNA, 15 bp, Homo sapiens
cagctatgtgtgtcc

SEQ ID NO: 44624 - DNA, 15 bp, Homo sapiens
agctatgtgtgtcct

SEQ ID NO: 44625 - DNA, 15 bp, Homo sapiens
gctatgtgtgtcctg

SEQ ID NO: 44626 - DNA, 15 bp, Homo sapiens
ctatgtgtgtcctgg

SEQ ID NO: 44627 - DNA, 15 bp, Homo sapiens
tatgtgtgtcctgga

SEQ ID NO: 44628 - DNA, 15 bp, Homo sapiens
atgtgtgtcctggaa

SEQ ID NO: 44629 - DNA, 15 bp, Homo sapiens
tgtgtgtcctggaac

SEQ ID NO: 44630 - DNA, 15 bp, Homo sapiens
gtgtgtcctggaacc

SEQ ID NO: 44631 - DNA, 15 bp, Homo sapiens
tgtgtcctggaacct

SEQ ID NO: 44632 - DNA, 15 bp, Homo sapiens
gtgtcctggaaccta

SEQ ID NO: 44633 - DNA, 15 bp, Homo sapiens
tgtcctggaacctaa

SEQ ID NO: 44634 - DNA, 15 bp, Homo sapiens
gtcctggaacctaac

SEQ ID NO: 44635 - DNA, 15 bp, Homo sapiens
tcctggaacctaact

SEQ ID NO: 44636 - DNA, 15 bp, Homo sapiens
cctggaacctaactt

SEQ ID NO: 44637 - DNA, 15 bp, Homo sapiens
ctggaacctaacttt

SEQ ID NO: 44638 - DNA, 15 bp, Homo sapiens
tggaacctaactttc

SEQ ID NO: 44639 - DNA, 15 bp, Homo sapiens
ggaacctaactttct

SEQ ID NO: 44640 - DNA, 15 bp, Homo sapiens
gaacctaactttcta

SEQ ID NO: 44641 - DNA, 15 bp, Homo sapiens
aacctaactttctaa

SEQ ID NO: 44642 - DNA, 15 bp, Homo sapiens
acctaactttctaaa

SEQ ID NO: 44643 - DNA, 15 bp, Homo sapiens
cctaactttctaaaa

SEQ ID NO: 44644 - DNA, 15 bp, Homo sapiens
ctaactttctaaaag

SEQ ID NO: 44645 - DNA, 15 bp, Homo sapiens
taactttctaaaagg

SEQ ID NO: 44646 - DNA, 15 bp, Homo sapiens
aactttctaaaagga

SEQ ID NO: 44647 - DNA, 15 bp, Homo sapiens
actttctaaaaggag

SEQ ID NO: 44648 - DNA, 15 bp, Homo sapiens
ctttctaaaaggagt

SEQ ID NO: 44649 - DNA, 15 bp, Homo sapiens
tttctaaaaggagtg

SEQ ID NO: 44650 - DNA, 15 bp, Homo sapiens
ttctaaaaggagtgc

SEQ ID NO: 44651 - DNA, 15 bp, Homo sapiens
tctaaaaggagtgcc

SEQ ID NO: 44652 - DNA, 15 bp, Homo sapiens
ctaaaaggagtgcca

SEQ ID NO: 44653 - DNA, 15 bp, Homo sapiens
taaaaggagtgccat

SEQ ID NO: 44654 - DNA, 15 bp, Homo sapiens
aaaaggagtgccatt

SEQ ID NO: 44655 - DNA, 15 bp, Homo sapiens
aaaggagtgccatta

SEQ ID NO: 44656 - DNA, 15 bp, Homo sapiens
aaggagtgccattaa

SEQ ID NO: 44657 - DNA, 15 bp, Homo sapiens
aggagtgccattaag

SEQ ID NO: 44658 - DNA, 15 bp, Homo sapiens
ggagtgccattaaga

SEQ ID NO: 44659 - DNA, 15 bp, Homo sapiens
gagtgccattaagat

SEQ ID NO: 44660 - DNA, 15 bp, Homo sapiens
agtgccattaagata

SEQ ID NO: 44661 - DNA, 15 bp, Homo sapiens
gtgccattaagatac

SEQ ID NO: 44662 - DNA, 15 bp, Homo sapiens
tgccattaagatact

SEQ ID NO: 44663 - DNA, 15 bp, Homo sapiens
gccattaagatacta

SEQ ID NO: 44664 - DNA, 15 bp, Homo sapiens
ccattaagatactac

SEQ ID NO: 44665 - DNA, 15 bp, Homo sapiens
cattaagatactact

SEQ ID NO: 44666 - DNA, 15 bp, Homo sapiens
attaagatactactt

SEQ ID NO: 44667 - DNA, 15 bp, Homo sapiens
ttaagatactacttt

SEQ ID NO: 44668 - DNA, 15 bp, Homo sapiens
taagatactactttg

SEQ ID NO: 44669 - DNA, 15 bp, Homo sapiens
aagatactactttgt

SEQ ID NO: 44670 - DNA, 15 bp, Homo sapiens
agatactactttgta

SEQ ID NO: 44671 - DNA, 15 bp, Homo sapiens
gatactactttgtag

SEQ ID NO: 44672 - DNA, 15 bp, Homo sapiens
atactactttgtagg

SEQ ID NO: 44673 - DNA, 15 bp, Homo sapiens
tactactttgtaggt

SEQ ID NO: 44674 - DNA, 15 bp, Homo sapiens
actactttgtaggtc

SEQ ID NO: 44675 - DNA, 15 bp, Homo sapiens
ctactttgtaggtct

SEQ ID NO: 44676 - DNA, 15 bp, Homo sapiens
tactttgtaggtcta

SEQ ID NO: 44677 - DNA, 15 bp, Homo sapiens
actttgtaggtctag

SEQ ID NO: 44678 - DNA, 15 bp, Homo sapiens
ctttgtaggtctaga

SEQ ID NO: 44679 - DNA, 15 bp, Homo sapiens
tttgtaggtctagat

SEQ ID NO: 44680 - DNA, 15 bp, Homo sapiens
ttgtaggtctagatt

SEQ ID NO: 44681 - DNA, 15 bp, Homo sapiens
tgtaggtctagatta

SEQ ID NO: 44682 - DNA, 15 bp, Homo sapiens
gtaggtctagattaa

SEQ ID NO: 44683 - DNA, 15 bp, Homo sapiens
taggtctagattaat

SEQ ID NO: 44684 - DNA, 15 bp, Homo sapiens
aggtctagattaatc

SEQ ID NO: 44685 - DNA, 15 bp, Homo sapiens
ggtctagattaatca

SEQ ID NO: 44686 - DNA, 15 bp, Homo sapiens
gtctagattaatcat

SEQ ID NO: 44687 - DNA, 15 bp, Homo sapiens
tctagattaatcatg

SEQ ID NO: 44688 - DNA, 15 bp, Homo sapiens
ctagattaatcatga

SEQ ID NO: 44689 - DNA, 15 bp, Homo sapiens
tagattaatcatgac

SEQ ID NO: 44690 - DNA, 15 bp, Homo sapiens
agattaatcatgacc

SEQ ID NO: 44691 - DNA, 15 bp, Homo sapiens
gattaatcatgacca

SEQ ID NO: 44692 - DNA, 15 bp, Homo sapiens
attaatcatgaccaa

SEQ ID NO: 44693 - DNA, 15 bp, Homo sapiens
ttaatcatgaccaag

SEQ ID NO: 44694 - DNA, 15 bp, Homo sapiens
taatcatgaccaaga

SEQ ID NO: 44695 - DNA, 15 bp, Homo sapiens
aatcatgaccaagat

SEQ ID NO: 44696 - DNA, 15 bp, Homo sapiens
atcatgaccaagatc

SEQ ID NO: 44697 - DNA, 15 bp, Homo sapiens
tcatgaccaagatcc

SEQ ID NO: 44698 - DNA, 15 bp, Homo sapiens
catgaccaagatcct

SEQ ID NO: 44699 - DNA, 15 bp, Homo sapiens
atgaccaagatcctt

SEQ ID NO: 44700 - DNA, 15 bp, Homo sapiens
tgaccaagatccttc

SEQ ID NO: 44701 - DNA, 15 bp, Homo sapiens
gaccaagatccttca

SEQ ID NO: 44702 - DNA, 15 bp, Homo sapiens
accaagatccttcaa

SEQ ID NO: 44703 - DNA, 15 bp, Homo sapiens
ccaagatccttcaac

SEQ ID NO: 44704 - DNA, 15 bp, Homo sapiens
caagatccttcaact

SEQ ID NO: 44705 - DNA, 15 bp, Homo sapiens
aagatccttcaactt

SEQ ID NO: 44706 - DNA, 15 bp, Homo sapiens
agatccttcaacttt

SEQ ID NO: 44707 - DNA, 15 bp, Homo sapiens
gatccttcaacttta

SEQ ID NO: 44708 - DNA, 15 bp, Homo sapiens
atccttcaactttaa

SEQ ID NO: 44709 - DNA, 15 bp, Homo sapiens
tccttcaactttaag

SEQ ID NO: 44710 - DNA, 15 bp, Homo sapiens
ccttcaactttaagg

SEQ ID NO: 44711 - DNA, 15 bp, Homo sapiens
cttcaactttaaggc

SEQ ID NO: 44712 - DNA, 15 bp, Homo sapiens
ttcaactttaaggct

SEQ ID NO: 44713 - DNA, 15 bp, Homo sapiens
tcaactttaaggctt

SEQ ID NO: 44714 - DNA, 15 bp, Homo sapiens
caactttaaggcttg

SEQ ID NO: 44715 - DNA, 15 bp, Homo sapiens
aactttaaggcttga

SEQ ID NO: 44716 - DNA, 15 bp, Homo sapiens
actttaaggcttgat

SEQ ID NO: 44717 - DNA, 15 bp, Homo sapiens
ctttaaggcttgatt

SEQ ID NO: 44718 - DNA, 15 bp, Homo sapiens
tttaaggcttgatta

SEQ ID NO: 44719 - DNA, 15 bp, Homo sapiens
ttaaggcttgattac

SEQ ID NO: 44720 - DNA, 15 bp, Homo sapiens
taaggcttgattact

SEQ ID NO: 44721 - DNA, 15 bp, Homo sapiens
aaggcttgattactt

SEQ ID NO: 44722 - DNA, 15 bp, Homo sapiens
aggcttgattactta

SEQ ID NO: 44723 - DNA, 15 bp, Homo sapiens
ggcttgattacttaa

SEQ ID NO: 44724 - DNA, 15 bp, Homo sapiens
gcttgattacttaaa

SEQ ID NO: 44725 - DNA, 15 bp, Homo sapiens
cttgattacttaaat

SEQ ID NO: 44726 - DNA, 15 bp, Homo sapiens
ttgattacttaaatg

SEQ ID NO: 44727 - DNA, 15 bp, Homo sapiens
tgattacttaaatgg

SEQ ID NO: 44728 - DNA, 15 bp, Homo sapiens
gattacttaaatgga

SEQ ID NO: 44729 - DNA, 15 bp, Homo sapiens
attacttaaatggat

SEQ ID NO: 44730 - DNA, 15 bp, Homo sapiens
ttacttaaatggatg

SEQ ID NO: 44731 - DNA, 15 bp, Homo sapiens
tacttaaatggatga

SEQ ID NO: 44732 - DNA, 15 bp, Homo sapiens
acttaaatggatgaa

SEQ ID NO: 44733 - DNA, 15 bp, Homo sapiens
cttaaatggatgaaa

SEQ ID NO: 44734 - DNA, 15 bp, Homo sapiens
ttaaatggatgaaat

SEQ ID NO: 44735 - DNA, 15 bp, Homo sapiens
taaatggatgaaatt

SEQ ID NO: 44736 - DNA, 15 bp, Homo sapiens
aaatggatgaaattt

SEQ ID NO: 44737 - DNA, 15 bp, Homo sapiens
aatggatgaaatttc

SEQ ID NO: 44738 - DNA, 15 bp, Homo sapiens
atggatgaaatttca

SEQ ID NO: 44739 - DNA, 15 bp, Homo sapiens
tggatgaaatttcag

SEQ ID NO: 44740 - DNA, 15 bp, Homo sapiens
ggatgaaatttcaga

SEQ ID NO: 44741 - DNA, 15 bp, Homo sapiens
gatgaaatttcagac

SEQ ID NO: 44742 - DNA, 15 bp, Homo sapiens
atgaaatttcagaca

SEQ ID NO: 44743 - DNA, 15 bp, Homo sapiens
tgaaatttcagacaa

SEQ ID NO: 44744 - DNA, 15 bp, Homo sapiens
gaaatttcagacaat

SEQ ID NO: 44745 - DNA, 15 bp, Homo sapiens
aaatttcagacaatg

SEQ ID NO: 44746 - DNA, 15 bp, Homo sapiens
aatttcagacaatgt

SEQ ID NO: 44747 - DNA, 15 bp, Homo sapiens
atttcagacaatgtg

SEQ ID NO: 44748 - DNA, 15 bp, Homo sapiens
tttcagacaatgtgg

SEQ ID NO: 44749 - DNA, 15 bp, Homo sapiens
ttcagacaatgtggt

SEQ ID NO: 44750 - DNA, 15 bp, Homo sapiens
tcagacaatgtggtc

SEQ ID NO: 44751 - DNA, 15 bp, Homo sapiens
cagacaatgtggtct

SEQ ID NO: 44752 - DNA, 15 bp, Homo sapiens
agacaatgtggtctt

SEQ ID NO: 44753 - DNA, 15 bp, Homo sapiens
gacaatgtggtcttt

SEQ ID NO: 44754 - DNA, 15 bp, Homo sapiens
acaatgtggtctttt

SEQ ID NO: 44755 - DNA, 15 bp, Homo sapiens
caatgtggtcttttt

SEQ ID NO: 44756 - DNA, 15 bp, Homo sapiens
aatgtggtctttttc

SEQ ID NO: 44757 - DNA, 15 bp, Homo sapiens
atgtggtctttttct

SEQ ID NO: 44758 - DNA, 15 bp, Homo sapiens
tgtggtctttttcta

SEQ ID NO: 44759 - DNA, 15 bp, Homo sapiens
gtggtctttttctaa

SEQ ID NO: 44760 - DNA, 15 bp, Homo sapiens
tggtctttttctaag

SEQ ID NO: 44761 - DNA, 15 bp, Homo sapiens
ggtctttttctaaga

SEQ ID NO: 44762 - DNA, 15 bp, Homo sapiens
gtctttttctaagag

SEQ ID NO: 44763 - DNA, 15 bp, Homo sapiens
tctttttctaagaga

SEQ ID NO: 44764 - DNA, 15 bp, Homo sapiens
ctttttctaagagaa

SEQ ID NO: 44765 - DNA, 15 bp, Homo sapiens
tttttctaagagaaa

SEQ ID NO: 44766 - DNA, 15 bp, Homo sapiens
ttttctaagagaaag

SEQ ID NO: 44767 - DNA, 15 bp, Homo sapiens
tttctaagagaaaga

SEQ ID NO: 44768 - DNA, 15 bp, Homo sapiens
ttctaagagaaagaa

SEQ ID NO: 44769 - DNA, 15 bp, Homo sapiens
tctaagagaaagaac

SEQ ID NO: 44770 - DNA, 15 bp, Homo sapiens
ctaagagaaagaact

SEQ ID NO: 44771 - DNA, 15 bp, Homo sapiens
taagagaaagaactg

SEQ ID NO: 44772 - DNA, 15 bp, Homo sapiens
aagagaaagaactgc

SEQ ID NO: 44773 - DNA, 15 bp, Homo sapiens
agagaaagaactgca

SEQ ID NO: 44774 - DNA, 15 bp, Homo sapiens
gagaaagaactgcaa

SEQ ID NO: 44775 - DNA, 15 bp, Homo sapiens
agaaagaactgcaaa

SEQ ID NO: 44776 - DNA, 15 bp, Homo sapiens
gaaagaactgcaaaa

SEQ ID NO: 44777 - DNA, 15 bp, Homo sapiens
aaagaactgcaaaaa

SEQ ID NO: 44778 - DNA, 15 bp, Homo sapiens
aagaactgcaaaaat

SEQ ID NO: 44779 - DNA, 15 bp, Homo sapiens
agaactgcaaaaatt

SEQ ID NO: 44780 - DNA, 15 bp, Homo sapiens
gaactgcaaaaattg

SEQ ID NO: 44781 - DNA, 15 bp, Homo sapiens
aactgcaaaaattgt

SEQ ID NO: 44782 - DNA, 15 bp, Homo sapiens
actgcaaaaattgta

SEQ ID NO: 44783 - DNA, 15 bp, Homo sapiens
ctgcaaaaattgtag

SEQ ID NO: 44784 - DNA, 15 bp, Homo sapiens
tgcaaaaattgtagc

SEQ ID NO: 44785 - DNA, 15 bp, Homo sapiens
gcaaaaattgtagca

SEQ ID NO: 44786 - DNA, 15 bp, Homo sapiens
caaaaattgtagcat

SEQ ID NO: 44787 - DNA, 15 bp, Homo sapiens
aaaaattgtagcatg

SEQ ID NO: 44788 - DNA, 15 bp, Homo sapiens
aaaattgtagcatgt

SEQ ID NO: 44789 - DNA, 15 bp, Homo sapiens
aaattgtagcatgtt

SEQ ID NO: 44790 - DNA, 15 bp, Homo sapiens
aattgtagcatgtta

SEQ ID NO: 44791 - DNA, 15 bp, Homo sapiens
attgtagcatgttag

SEQ ID NO: 44792 - DNA, 15 bp, Homo sapiens
ttgtagcatgttaga

SEQ ID NO: 44793 - DNA, 15 bp, Homo sapiens
tgtagcatgttagaa

SEQ ID NO: 44794 - DNA, 15 bp, Homo sapiens
gtagcatgttagaac

SEQ ID NO: 44795 - DNA, 15 bp, Homo sapiens
tagcatgttagaact

SEQ ID NO: 44796 - DNA, 15 bp, Homo sapiens
agcatgttagaacta

SEQ ID NO: 44797 - DNA, 15 bp, Homo sapiens
gcatgttagaactaa

SEQ ID NO: 44798 - DNA, 15 bp, Homo sapiens
catgttagaactaag

SEQ ID NO: 44799 - DNA, 15 bp, Homo sapiens
atgttagaactaagt

SEQ ID NO: 44800 - DNA, 15 bp, Homo sapiens
tgttagaactaagtt

SEQ ID NO: 44801 - DNA, 15 bp, Homo sapiens
gttagaactaagttt

SEQ ID NO: 44802 - DNA, 15 bp, Homo sapiens
ttagaactaagtttc

SEQ ID NO: 44803 - DNA, 15 bp, Homo sapiens
tagaactaagtttct

SEQ ID NO: 44804 - DNA, 15 bp, Homo sapiens
agaactaagtttcta

SEQ ID NO: 44805 - DNA, 15 bp, Homo sapiens
gaactaagtttctat

SEQ ID NO: 44806 - DNA, 15 bp, Homo sapiens
aactaagtttctatg

SEQ ID NO: 44807 - DNA, 15 bp, Homo sapiens
actaagtttctatgg

SEQ ID NO: 44808 - DNA, 15 bp, Homo sapiens
ctaagtttctatggc

SEQ ID NO: 44809 - DNA, 15 bp, Homo sapiens
taagtttctatggcc

SEQ ID NO: 44810 - DNA, 15 bp, Homo sapiens
aagtttctatggcca

SEQ ID NO: 44811 - DNA, 15 bp, Homo sapiens
agtttctatggccaa

SEQ ID NO: 44812 - DNA, 15 bp, Homo sapiens
gtttctatggccaaa

SEQ ID NO: 44813 - DNA, 15 bp, Homo sapiens
tttctatggccaaag

SEQ ID NO: 44814 - DNA, 15 bp, Homo sapiens
ttctatggccaaagg

SEQ ID NO: 44815 - DNA, 15 bp, Homo sapiens
tctatggccaaaggt

SEQ ID NO: 44816 - DNA, 15 bp, Homo sapiens
ctatggccaaaggtg

SEQ ID NO: 44817 - DNA, 15 bp, Homo sapiens
tatggccaaaggtgg

SEQ ID NO: 44818 - DNA, 15 bp, Homo sapiens
atggccaaaggtggg

SEQ ID NO: 44819 - DNA, 15 bp, Homo sapiens
tggccaaaggtggga

SEQ ID NO: 44820 - DNA, 15 bp, Homo sapiens
ggccaaaggtgggaa

SEQ ID NO: 44821 - DNA, 15 bp, Homo sapiens
gccaaaggtgggaaa

SEQ ID NO: 44822 - DNA, 15 bp, Homo sapiens
ccaaaggtgggaaaa

SEQ ID NO: 44823 - DNA, 15 bp, Homo sapiens
caaaggtgggaaaac

SEQ ID NO: 44824 - DNA, 15 bp, Homo sapiens
aaaggtgggaaaaca

SEQ ID NO: 44825 - DNA, 15 bp, Homo sapiens
aaggtgggaaaacaa

SEQ ID NO: 44826 - DNA, 15 bp, Homo sapiens
aggtgggaaaacaag

SEQ ID NO: 44827 - DNA, 15 bp, Homo sapiens
ggtgggaaaacaagc

SEQ ID NO: 44828 - DNA, 15 bp, Homo sapiens
gtgggaaaacaagca

SEQ ID NO: 44829 - DNA, 15 bp, Homo sapiens
tgggaaaacaagcaa

SEQ ID NO: 44830 - DNA, 15 bp, Homo sapiens
gggaaaacaagcaac

SEQ ID NO: 44831 - DNA, 15 bp, Homo sapiens
ggaaaacaagcaaca

SEQ ID NO: 44832 - DNA, 15 bp, Homo sapiens
gaaaacaagcaacag

SEQ ID NO: 44833 - DNA, 15 bp, Homo sapiens
aaaacaagcaacagt

SEQ ID NO: 44834 - DNA, 15 bp, Homo sapiens
aaacaagcaacagta

SEQ ID NO: 44835 - DNA, 15 bp, Homo sapiens
aacaagcaacagtac

SEQ ID NO: 44836 - DNA, 15 bp, Homo sapiens
acaagcaacagtaca

SEQ ID NO: 44837 - DNA, 15 bp, Homo sapiens
caagcaacagtacag

SEQ ID NO: 44838 - DNA, 15 bp, Homo sapiens
aagcaacagtacaga

SEQ ID NO: 44839 - DNA, 15 bp, Homo sapiens
agcaacagtacagat

SEQ ID NO: 44840 - DNA, 15 bp, Homo sapiens
gcaacagtacagata

SEQ ID NO: 44841 - DNA, 15 bp, Homo sapiens
caacagtacagataa

SEQ ID NO: 44842 - DNA, 15 bp, Homo sapiens
aacagtacagataat

SEQ ID NO: 44843 - DNA, 15 bp, Homo sapiens
acagtacagataatt

SEQ ID NO: 44844 - DNA, 15 bp, Homo sapiens
cagtacagataattc

SEQ ID NO: 44845 - DNA, 15 bp, Homo sapiens
agtacagataattca

SEQ ID NO: 44846 - DNA, 15 bp, Homo sapiens
gtacagataattcag

SEQ ID NO: 44847 - DNA, 15 bp, Homo sapiens
tacagataattcagg

SEQ ID NO: 44848 - DNA, 15 bp, Homo sapiens
acagataattcaggc

SEQ ID NO: 44849 - DNA, 15 bp, Homo sapiens
cagataattcaggca

SEQ ID NO: 44850 - DNA, 15 bp, Homo sapiens
agataattcaggcat

SEQ ID NO: 44851 - DNA, 15 bp, Homo sapiens
gataattcaggcata

SEQ ID NO: 44852 - DNA, 15 bp, Homo sapiens
ataattcaggcatac

SEQ ID NO: 44853 - DNA, 15 bp, Homo sapiens
taattcaggcataca

SEQ ID NO: 44854 - DNA, 15 bp, Homo sapiens
aattcaggcatacag

SEQ ID NO: 44855 - DNA, 15 bp, Homo sapiens
attcaggcatacaga

SEQ ID NO: 44856 - DNA, 15 bp, Homo sapiens
ttcaggcatacagaa

SEQ ID NO: 44857 - DNA, 15 bp, Homo sapiens
tcaggcatacagaaa

SEQ ID NO: 44858 - DNA, 15 bp, Homo sapiens
caggcatacagaaaa

SEQ ID NO: 44859 - DNA, 15 bp, Homo sapiens
aggcatacagaaaaa

SEQ ID NO: 44860 - DNA, 15 bp, Homo sapiens
ggcatacagaaaaaa

SEQ ID NO: 44861 - DNA, 15 bp, Homo sapiens
gcatacagaaaaaaa

SEQ ID NO: 44862 - DNA, 15 bp, Homo sapiens
catacagaaaaaaaa

SEQ ID NO: 44863 - DNA, 15 bp, Homo sapiens
atacagaaaaaaaaa

SEQ ID NO: 44864 - DNA, 15 bp, Homo sapiens
tacagaaaaaaaaaa

SEQ ID NO: 44865 - DNA, 15 bp, Homo sapiens
acagaaaaaaaaaaa

SEQ ID NO: 44866 - DNA, 15 bp, Homo sapiens
cagaaaaaaaaaaaa

SEQ ID NO: 44867 - DNA, 15 bp, Homo sapiens
agaaaaaaaaaaaag

SEQ ID NO: 44868 - DNA, 15 bp, Homo sapiens
gaaaaaaaaaaaagt

SEQ ID NO: 44869 - DNA, 15 bp, Homo sapiens
aaaaaaaaaaaagtc

SEQ ID NO: 44870 - DNA, 15 bp, Homo sapiens
aaaaaaaaaaagtct

SEQ ID NO: 44871 - DNA, 15 bp, Homo sapiens
aaaaaaaaaagtctt

SEQ ID NO: 44872 - DNA, 15 bp, Homo sapiens
aaaaaaaaagtcttg

SEQ ID NO: 44873 - DNA, 15 bp, Homo sapiens
aaaaaaaagtcttgt

SEQ ID NO: 44874 - DNA, 15 bp, Homo sapiens
aaaaaaagtcttgtt

SEQ ID NO: 44875 - DNA, 15 bp, Homo sapiens
aaaaaagtcttgttt

SEQ ID NO: 44876 - DNA, 15 bp, Homo sapiens
aaaaagtcttgtttg

SEQ ID NO: 44877 - DNA, 15 bp, Homo sapiens
aaaagtcttgtttgt

SEQ ID NO: 44878 - DNA, 15 bp, Homo sapiens
aaagtcttgtttgtt

SEQ ID NO: 44879 - DNA, 15 bp, Homo sapiens
aagtcttgtttgttc

SEQ ID NO: 44880 - DNA, 15 bp, Homo sapiens
agtcttgtttgttcc

SEQ ID NO: 44881 - DNA, 15 bp, Homo sapiens
gtcttgtttgttccc

SEQ ID NO: 44882 - DNA, 15 bp, Homo sapiens
tcttgtttgttccca

SEQ ID NO: 44883 - DNA, 15 bp, Homo sapiens
cttgtttgttcccag

SEQ ID NO: 44884 - DNA, 15 bp, Homo sapiens
ttgtttgttcccagc

SEQ ID NO: 44885 - DNA, 15 bp, Homo sapiens
tgtttgttcccagcc

SEQ ID NO: 44886 - DNA, 15 bp, Homo sapiens
gtttgttcccagccc

SEQ ID NO: 44887 - DNA, 15 bp, Homo sapiens
tttgttcccagcccc

SEQ ID NO: 44888 - DNA, 15 bp, Homo sapiens
ttgttcccagcccct

SEQ ID NO: 44889 - DNA, 15 bp, Homo sapiens
tgttcccagcccctt

SEQ ID NO: 44890 - DNA, 15 bp, Homo sapiens
gttcccagccccttt

SEQ ID NO: 44891 - DNA, 15 bp, Homo sapiens
ttcccagcccctttg

SEQ ID NO: 44892 - DNA, 15 bp, Homo sapiens
tcccagcccctttgg

SEQ ID NO: 44893 - DNA, 15 bp, Homo sapiens
cccagcccctttggg

SEQ ID NO: 44894 - DNA, 15 bp, Homo sapiens
ccagcccctttgggt

SEQ ID NO: 44895 - DNA, 15 bp, Homo sapiens
cagcccctttgggtt

SEQ ID NO: 44896 - DNA, 15 bp, Homo sapiens
agcccctttgggttt

SEQ ID NO: 44897 - DNA, 15 bp, Homo sapiens
gcccctttgggtttt

SEQ ID NO: 44898 - DNA, 15 bp, Homo sapiens
cccctttgggtttta

SEQ ID NO: 44899 - DNA, 15 bp, Homo sapiens
ccctttgggttttac

SEQ ID NO: 44900 - DNA, 15 bp, Homo sapiens
cctttgggttttacc

SEQ ID NO: 44901 - DNA, 15 bp, Homo sapiens
ctttgggttttacct

SEQ ID NO: 44902 - DNA, 15 bp, Homo sapiens
tttgggttttacctg

SEQ ID NO: 44903 - DNA, 15 bp, Homo sapiens
ttgggttttacctgt

SEQ ID NO: 44904 - DNA, 15 bp, Homo sapiens
tgggttttacctgtg

SEQ ID NO: 44905 - DNA, 15 bp, Homo sapiens
gggttttacctgtga

SEQ ID NO: 44906 - DNA, 15 bp, Homo sapiens
ggttttacctgtgag

SEQ ID NO: 44907 - DNA, 15 bp, Homo sapiens
gttttacctgtgagc

SEQ ID NO: 44908 - DNA, 15 bp, Homo sapiens
ttttacctgtgagcg

SEQ ID NO: 44909 - DNA, 15 bp, Homo sapiens
tttacctgtgagcgt

SEQ ID NO: 44910 - DNA, 15 bp, Homo sapiens
ttacctgtgagcgtg

SEQ ID NO: 44911 - DNA, 15 bp, Homo sapiens
tacctgtgagcgtgt

SEQ ID NO: 44912 - DNA, 15 bp, Homo sapiens
acctgtgagcgtgta

SEQ ID NO: 44913 - DNA, 15 bp, Homo sapiens
cctgtgagcgtgtaa

SEQ ID NO: 44914 - DNA, 15 bp, Homo sapiens
ctgtgagcgtgtaat

SEQ ID NO: 44915 - DNA, 15 bp, Homo sapiens
tgtgagcgtgtaatc

SEQ ID NO: 44916 - DNA, 15 bp, Homo sapiens
gtgagcgtgtaatca

SEQ ID NO: 44917 - DNA, 15 bp, Homo sapiens
tgagcgtgtaatcag

SEQ ID NO: 44918 - DNA, 15 bp, Homo sapiens
gagcgtgtaatcaga

SEQ ID NO: 44919 - DNA, 15 bp, Homo sapiens
agcgtgtaatcagag

SEQ ID NO: 44920 - DNA, 15 bp, Homo sapiens
gcgtgtaatcagaga

SEQ ID NO: 44921 - DNA, 15 bp, Homo sapiens
cgtgtaatcagagaa

SEQ ID NO: 44922 - DNA, 15 bp, Homo sapiens
gtgtaatcagagaaa

SEQ ID NO: 44923 - DNA, 15 bp, Homo sapiens
tgtaatcagagaaaa

SEQ ID NO: 44924 - DNA, 15 bp, Homo sapiens
gtaatcagagaaaac

SEQ ID NO: 44925 - DNA, 15 bp, Homo sapiens
taatcagagaaaaca

SEQ ID NO: 44926 - DNA, 15 bp, Homo sapiens
aatcagagaaaacac

SEQ ID NO: 44927 - DNA, 15 bp, Homo sapiens
atcagagaaaacaca

SEQ ID NO: 44928 - DNA, 15 bp, Homo sapiens
tcagagaaaacacag

SEQ ID NO: 44929 - DNA, 15 bp, Homo sapiens
cagagaaaacacagt

SEQ ID NO: 44930 - DNA, 15 bp, Homo sapiens
agagaaaacacagtt

SEQ ID NO: 44931 - DNA, 15 bp, Homo sapiens
gagaaaacacagttt

SEQ ID NO: 44932 - DNA, 15 bp, Homo sapiens
agaaaacacagttta

SEQ ID NO: 44933 - DNA, 15 bp, Homo sapiens
gaaaacacagtttaa

SEQ ID NO: 44934 - DNA, 15 bp, Homo sapiens
aaaacacagtttaaa

SEQ ID NO: 44935 - DNA, 15 bp, Homo sapiens
aaacacagtttaaag

SEQ ID NO: 44936 - DNA, 15 bp, Homo sapiens
aacacagtttaaaga

SEQ ID NO: 44937 - DNA, 15 bp, Homo sapiens
acacagtttaaagat

SEQ ID NO: 44938 - DNA, 15 bp, Homo sapiens
cacagtttaaagata

SEQ ID NO: 44939 - DNA, 15 bp, Homo sapiens
acagtttaaagatat

SEQ ID NO: 44940 - DNA, 15 bp, Homo sapiens
cagtttaaagatatg

SEQ ID NO: 44941 - DNA, 15 bp, Homo sapiens
agtttaaagatatgg

SEQ ID NO: 44942 - DNA, 15 bp, Homo sapiens
gtttaaagatatggc

SEQ ID NO: 44943 - DNA, 15 bp, Homo sapiens
tttaaagatatggct

SEQ ID NO: 44944 - DNA, 15 bp, Homo sapiens
ttaaagatatggctg

SEQ ID NO: 44945 - DNA, 15 bp, Homo sapiens
taaagatatggctgc

SEQ ID NO: 44946 - DNA, 15 bp, Homo sapiens
aaagatatggctgct

SEQ ID NO: 44947 - DNA, 15 bp, Homo sapiens
aagatatggctgctc

SEQ ID NO: 44948 - DNA, 15 bp, Homo sapiens
agatatggctgctca

SEQ ID NO: 44949 - DNA, 15 bp, Homo sapiens
gatatggctgctcat

SEQ ID NO: 44950 - DNA, 15 bp, Homo sapiens
atatggctgctcatt

SEQ ID NO: 44951 - DNA, 15 bp, Homo sapiens
tatggctgctcattt

SEQ ID NO: 44952 - DNA, 15 bp, Homo sapiens
atggctgctcatttt

SEQ ID NO: 44953 - DNA, 15 bp, Homo sapiens
tggctgctcatttta

SEQ ID NO: 44954 - DNA, 15 bp, Homo sapiens
ggctgctcattttag

SEQ ID NO: 44955 - DNA, 15 bp, Homo sapiens
gctgctcattttaga

SEQ ID NO: 44956 - DNA, 15 bp, Homo sapiens
ctgctcattttagac

SEQ ID NO: 44957 - DNA, 15 bp, Homo sapiens
tgctcattttagaca

SEQ ID NO: 44958 - DNA, 15 bp, Homo sapiens
gctcattttagacag

SEQ ID NO: 44959 - DNA, 15 bp, Homo sapiens
ctcattttagacagt

SEQ ID NO: 44960 - DNA, 15 bp, Homo sapiens
tcattttagacagtc

SEQ ID NO: 44961 - DNA, 15 bp, Homo sapiens
cattttagacagtcc

SEQ ID NO: 44962 - DNA, 15 bp, Homo sapiens
attttagacagtcct

SEQ ID NO: 44963 - DNA, 15 bp, Homo sapiens
ttttagacagtccta

SEQ ID NO: 44964 - DNA, 15 bp, Homo sapiens
tttagacagtcctat

SEQ ID NO: 44965 - DNA, 15 bp, Homo sapiens
ttagacagtcctata

SEQ ID NO: 44966 - DNA, 15 bp, Homo sapiens
tagacagtcctataa

SEQ ID NO: 44967 - DNA, 15 bp, Homo sapiens
agacagtcctataaa

SEQ ID NO: 44968 - DNA, 15 bp, Homo sapiens
gacagtcctataaag

SEQ ID NO: 44969 - DNA, 15 bp, Homo sapiens
acagtcctataaaga

SEQ ID NO: 44970 - DNA, 15 bp, Homo sapiens
cagtcctataaagat

SEQ ID NO: 44971 - DNA, 15 bp, Homo sapiens
agtcctataaagata

SEQ ID NO: 44972 - DNA, 15 bp, Homo sapiens
gtcctataaagataa

SEQ ID NO: 44973 - DNA, 15 bp, Homo sapiens
tcctataaagataat

SEQ ID NO: 44974 - DNA, 15 bp, Homo sapiens
cctataaagataatg

SEQ ID NO: 44975 - DNA, 15 bp, Homo sapiens
ctataaagataatgg

SEQ ID NO: 44976 - DNA, 15 bp, Homo sapiens
tataaagataatggt

SEQ ID NO: 44977 - DNA, 15 bp, Homo sapiens
ataaagataatggta

SEQ ID NO: 44978 - DNA, 15 bp, Homo sapiens
taaagataatggtaa

SEQ ID NO: 44979 - DNA, 15 bp, Homo sapiens
aaagataatggtaat

SEQ ID NO: 44980 - DNA, 15 bp, Homo sapiens
aagataatggtaatg

SEQ ID NO: 44981 - DNA, 15 bp, Homo sapiens
agataatggtaatgc

SEQ ID NO: 44982 - DNA, 15 bp, Homo sapiens
gataatggtaatgct

SEQ ID NO: 44983 - DNA, 15 bp, Homo sapiens
ataatggtaatgctg

SEQ ID NO: 44984 - DNA, 15 bp, Homo sapiens
taatggtaatgctga

SEQ ID NO: 44985 - DNA, 15 bp, Homo sapiens
aatggtaatgctgaa

SEQ ID NO: 44986 - DNA, 15 bp, Homo sapiens
atggtaatgctgaag

SEQ ID NO: 44987 - DNA, 15 bp, Homo sapiens
tggtaatgctgaaga

SEQ ID NO: 44988 - DNA, 15 bp, Homo sapiens
ggtaatgctgaagaa

SEQ ID NO: 44989 - DNA, 15 bp, Homo sapiens
gtaatgctgaagaag

SEQ ID NO: 44990 - DNA, 15 bp, Homo sapiens
taatgctgaagaagt

SEQ ID NO: 44991 - DNA, 15 bp, Homo sapiens
aatgctgaagaagtt

SEQ ID NO: 44992 - DNA, 15 bp, Homo sapiens
atgctgaagaagtta

SEQ ID NO: 44993 - DNA, 15 bp, Homo sapiens
tgctgaagaagttat

SEQ ID NO: 44994 - DNA, 15 bp, Homo sapiens
gctgaagaagttatt

SEQ ID NO: 44995 - DNA, 15 bp, Homo sapiens
ctgaagaagttatta

SEQ ID NO: 44996 - DNA, 15 bp, Homo sapiens
tgaagaagttattaa

SEQ ID NO: 44997 - DNA, 15 bp, Homo sapiens
gaagaagttattaat

SEQ ID NO: 44998 - DNA, 15 bp, Homo sapiens
aagaagttattaata

SEQ ID NO: 44999 - DNA, 15 bp, Homo sapiens
agaagttattaatat

SEQ ID NO: 45000 - DNA, 15 bp, Homo sapiens
gaagttattaatatt

SEQ ID NO: 45001 - DNA, 15 bp, Homo sapiens
aagttattaatattt

SEQ ID NO: 45002 - DNA, 15 bp, Homo sapiens
agttattaatatttg

SEQ ID NO: 45003 - DNA, 15 bp, Homo sapiens
gttattaatatttgg

SEQ ID NO: 45004 - DNA, 15 bp, Homo sapiens
ttattaatatttggt

SEQ ID NO: 45005 - DNA, 15 bp, Homo sapiens
tattaatatttggtt

SEQ ID NO: 45006 - DNA, 15 bp, Homo sapiens
attaatatttggttc

SEQ ID NO: 45007 - DNA, 15 bp, Homo sapiens
ttaatatttggttcc

SEQ ID NO: 45008 - DNA, 15 bp, Homo sapiens
taatatttggttcct

SEQ ID NO: 45009 - DNA, 15 bp, Homo sapiens
aatatttggttccta

SEQ ID NO: 45010 - DNA, 15 bp, Homo sapiens
atatttggttcctaa

SEQ ID NO: 45011 - DNA, 15 bp, Homo sapiens
tatttggttcctaac

SEQ ID NO: 45012 - DNA, 15 bp, Homo sapiens
atttggttcctaaca

SEQ ID NO: 45013 - DNA, 15 bp, Homo sapiens
tttggttcctaacat

SEQ ID NO: 45014 - DNA, 15 bp, Homo sapiens
ttggttcctaacata

SEQ ID NO: 45015 - DNA, 15 bp, Homo sapiens
tggttcctaacatat

SEQ ID NO: 45016 - DNA, 15 bp, Homo sapiens
ggttcctaacatata

SEQ ID NO: 45017 - DNA, 15 bp, Homo sapiens
gttcctaacatatat

SEQ ID NO: 45018 - DNA, 15 bp, Homo sapiens
ttcctaacatatatg

SEQ ID NO: 45019 - DNA, 15 bp, Homo sapiens
tcctaacatatatga

SEQ ID NO: 45020 - DNA, 15 bp, Homo sapiens
cctaacatatatgat

SEQ ID NO: 45021 - DNA, 15 bp, Homo sapiens
ctaacatatatgata

SEQ ID NO: 45022 - DNA, 15 bp, Homo sapiens
taacatatatgatac

SEQ ID NO: 45023 - DNA, 15 bp, Homo sapiens
aacatatatgataca

SEQ ID NO: 45024 - DNA, 15 bp, Homo sapiens
acatatatgatacaa

SEQ ID NO: 45025 - DNA, 15 bp, Homo sapiens
catatatgatacaaa

SEQ ID NO: 45026 - DNA, 15 bp, Homo sapiens
atatatgatacaaac

SEQ ID NO: 45027 - DNA, 15 bp, Homo sapiens
tatatgatacaaact

SEQ ID NO: 45028 - DNA, 15 bp, Homo sapiens
atatgatacaaacta

SEQ ID NO: 45029 - DNA, 15 bp, Homo sapiens
tatgatacaaactat

SEQ ID NO: 45030 - DNA, 15 bp, Homo sapiens
atgatacaaactatt

SEQ ID NO: 45031 - DNA, 15 bp, Homo sapiens
tgatacaaactatta

SEQ ID NO: 45032 - DNA, 15 bp, Homo sapiens
gatacaaactattaa

SEQ ID NO: 45033 - DNA, 15 bp, Homo sapiens
atacaaactattaag

SEQ ID NO: 45034 - DNA, 15 bp, Homo sapiens
tacaaactattaaga

SEQ ID NO: 45035 - DNA, 15 bp, Homo sapiens
acaaactattaagag

SEQ ID NO: 45036 - DNA, 15 bp, Homo sapiens
caaactattaagagt

SEQ ID NO: 45037 - DNA, 15 bp, Homo sapiens
aaactattaagagtt

SEQ ID NO: 45038 - DNA, 15 bp, Homo sapiens
aactattaagagttg

SEQ ID NO: 45039 - DNA, 15 bp, Homo sapiens
actattaagagttga

SEQ ID NO: 45040 - DNA, 15 bp, Homo sapiens
ctattaagagttgac

SEQ ID NO: 45041 - DNA, 15 bp, Homo sapiens
tattaagagttgacc

SEQ ID NO: 45042 - DNA, 15 bp, Homo sapiens
attaagagttgacct

SEQ ID NO: 45043 - DNA, 15 bp, Homo sapiens
ttaagagttgacctt

SEQ ID NO: 45044 - DNA, 15 bp, Homo sapiens
taagagttgacctta

SEQ ID NO: 45045 - DNA, 15 bp, Homo sapiens
aagagttgaccttaa

SEQ ID NO: 45046 - DNA, 15 bp, Homo sapiens
agagttgaccttaat

SEQ ID NO: 45047 - DNA, 15 bp, Homo sapiens
gagttgaccttaatg

SEQ ID NO: 45048 - DNA, 15 bp, Homo sapiens
agttgaccttaatga

SEQ ID NO: 45049 - DNA, 15 bp, Homo sapiens
gttgaccttaatgaa

SEQ ID NO: 45050 - DNA, 15 bp, Homo sapiens
ttgaccttaatgaaa

SEQ ID NO: 45051 - DNA, 15 bp, Homo sapiens
tgaccttaatgaaat

SEQ ID NO: 45052 - DNA, 15 bp, Homo sapiens
gaccttaatgaaatc

SEQ ID NO: 45053 - DNA, 15 bp, Homo sapiens
accttaatgaaatct

SEQ ID NO: 45054 - DNA, 15 bp, Homo sapiens
ccttaatgaaatctt

SEQ ID NO: 45055 - DNA, 15 bp, Homo sapiens
cttaatgaaatcttg

SEQ ID NO: 45056 - DNA, 15 bp, Homo sapiens
ttaatgaaatcttgc

SEQ ID NO: 45057 - DNA, 15 bp, Homo sapiens
taatgaaatcttgca

SEQ ID NO: 45058 - DNA, 15 bp, Homo sapiens
aatgaaatcttgcaa

SEQ ID NO: 45059 - DNA, 15 bp, Homo sapiens
atgaaatcttgcaaa

SEQ ID NO: 45060 - DNA, 15 bp, Homo sapiens
tgaaatcttgcaaat

SEQ ID NO: 45061 - DNA, 15 bp, Homo sapiens
gaaatcttgcaaatc

SEQ ID NO: 45062 - DNA, 15 bp, Homo sapiens
aaatcttgcaaatca

SEQ ID NO: 45063 - DNA, 15 bp, Homo sapiens
aatcttgcaaatcaa

SEQ ID NO: 45064 - DNA, 15 bp, Homo sapiens
atcttgcaaatcaat

SEQ ID NO: 45065 - DNA, 15 bp, Homo sapiens
tcttgcaaatcaata

SEQ ID NO: 45066 - DNA, 15 bp, Homo sapiens
cttgcaaatcaatat

SEQ ID NO: 45067 - DNA, 15 bp, Homo sapiens
ttgcaaatcaatatt

SEQ ID NO: 45068 - DNA, 15 bp, Homo sapiens
tgcaaatcaatattt

SEQ ID NO: 45069 - DNA, 15 bp, Homo sapiens
gcaaatcaatattta

SEQ ID NO: 45070 - DNA, 15 bp, Homo sapiens
caaatcaatatttaa

SEQ ID NO: 45071 - DNA, 15 bp, Homo sapiens
aaatcaatatttaaa

SEQ ID NO: 45072 - DNA, 15 bp, Homo sapiens
aatcaatatttaaaa

SEQ ID NO: 45073 - DNA, 15 bp, Homo sapiens
atcaatatttaaaaa

SEQ ID NO: 45074 - DNA, 15 bp, Homo sapiens
tcaatatttaaaaat

SEQ ID NO: 45075 - DNA, 15 bp, Homo sapiens
caatatttaaaaatt

SEQ ID NO: 45076 - DNA, 15 bp, Homo sapiens
aatatttaaaaattt

SEQ ID NO: 45077 - DNA, 15 bp, Homo sapiens
atatttaaaaatttt

SEQ ID NO: 45078 - DNA, 15 bp, Homo sapiens
tatttaaaaattttt

SEQ ID NO: 45079 - DNA, 15 bp, Homo sapiens
atttaaaaattttta

SEQ ID NO: 45080 - DNA, 15 bp, Homo sapiens
tttaaaaatttttaa

SEQ ID NO: 45081 - DNA, 15 bp, Homo sapiens
ttaaaaatttttaat

SEQ ID NO: 45082 - DNA, 15 bp, Homo sapiens
taaaaatttttaatt

SEQ ID NO: 45083 - DNA, 15 bp, Homo sapiens
aaaaatttttaattt

SEQ ID NO: 45084 - DNA, 15 bp, Homo sapiens
aaaatttttaatttg

SEQ ID NO: 45085 - DNA, 15 bp, Homo sapiens
aaatttttaatttgc

SEQ ID NO: 45086 - DNA, 15 bp, Homo sapiens
aatttttaatttgca

SEQ ID NO: 45087 - DNA, 15 bp, Homo sapiens
atttttaatttgcat

SEQ ID NO: 45088 - DNA, 15 bp, Homo sapiens
tttttaatttgcatc

SEQ ID NO: 45089 - DNA, 15 bp, Homo sapiens
ttttaatttgcatcc

SEQ ID NO: 45090 - DNA, 15 bp, Homo sapiens
tttaatttgcatcca

SEQ ID NO: 45091 - DNA, 15 bp, Homo sapiens
ttaatttgcatccag

SEQ ID NO: 45092 - DNA, 15 bp, Homo sapiens
taatttgcatccagt

SEQ ID NO: 45093 - DNA, 15 bp, Homo sapiens
aatttgcatccagtt

SEQ ID NO: 45094 - DNA, 15 bp, Homo sapiens
atttgcatccagttg

SEQ ID NO: 45095 - DNA, 15 bp, Homo sapiens
tttgcatccagttga

SEQ ID NO: 45096 - DNA, 15 bp, Homo sapiens
ttgcatccagttgac

SEQ ID NO: 45097 - DNA, 15 bp, Homo sapiens
tgcatccagttgact

SEQ ID NO: 45098 - DNA, 15 bp, Homo sapiens
gcatccagttgacta

SEQ ID NO: 45099 - DNA, 15 bp, Homo sapiens
catccagttgactat

SEQ ID NO: 45100 - DNA, 15 bp, Homo sapiens
atccagttgactata

SEQ ID NO: 45101 - DNA, 15 bp, Homo sapiens
tccagttgactatat

SEQ ID NO: 45102 - DNA, 15 bp, Homo sapiens
ccagttgactatatc

SEQ ID NO: 45103 - DNA, 15 bp, Homo sapiens
cagttgactatatcc

SEQ ID NO: 45104 - DNA, 15 bp, Homo sapiens
agttgactatatcca

SEQ ID NO: 45105 - DNA, 15 bp, Homo sapiens
gttgactatatccat

SEQ ID NO: 45106 - DNA, 15 bp, Homo sapiens
ttgactatatccata

SEQ ID NO: 45107 - DNA, 15 bp, Homo sapiens
tgactatatccatat

SEQ ID NO: 45108 - DNA, 15 bp, Homo sapiens
gactatatccatatg

SEQ ID NO: 45109 - DNA, 15 bp, Homo sapiens
actatatccatatgt

SEQ ID NO: 45110 - DNA, 15 bp, Homo sapiens
ctatatccatatgtt

SEQ ID NO: 45111 - DNA, 15 bp, Homo sapiens
tatatccatatgtta

SEQ ID NO: 45112 - DNA, 15 bp, Homo sapiens
atatccatatgttag

SEQ ID NO: 45113 - DNA, 15 bp, Homo sapiens
tatccatatgttaga

SEQ ID NO: 45114 - DNA, 15 bp, Homo sapiens
atccatatgttagac

SEQ ID NO: 45115 - DNA, 15 bp, Homo sapiens
tccatatgttagact

SEQ ID NO: 45116 - DNA, 15 bp, Homo sapiens
ccatatgttagactt

SEQ ID NO: 45117 - DNA, 15 bp, Homo sapiens
catatgttagacttc

SEQ ID NO: 45118 - DNA, 15 bp, Homo sapiens
atatgttagacttcc

SEQ ID NO: 45119 - DNA, 15 bp, Homo sapiens
tatgttagacttcct

SEQ ID NO: 45120 - DNA, 15 bp, Homo sapiens
atgttagacttcctt

SEQ ID NO: 45121 - DNA, 15 bp, Homo sapiens
tgttagacttccttt

SEQ ID NO: 45122 - DNA, 15 bp, Homo sapiens
gttagacttcctttt

SEQ ID NO: 45123 - DNA, 15 bp, Homo sapiens
ttagacttccttttg

SEQ ID NO: 45124 - DNA, 15 bp, Homo sapiens
tagacttccttttgt

SEQ ID NO: 45125 - DNA, 15 bp, Homo sapiens
agacttccttttgtt

SEQ ID NO: 45126 - DNA, 15 bp, Homo sapiens
gacttccttttgttc

SEQ ID NO: 45127 - DNA, 15 bp, Homo sapiens
acttccttttgttca

SEQ ID NO: 45128 - DNA, 15 bp, Homo sapiens
cttccttttgttcat

SEQ ID NO: 45129 - DNA, 15 bp, Homo sapiens
ttccttttgttcatt

SEQ ID NO: 45130 - DNA, 15 bp, Homo sapiens
tccttttgttcattc

SEQ ID NO: 45131 - DNA, 15 bp, Homo sapiens
ccttttgttcattca

SEQ ID NO: 45132 - DNA, 15 bp, Homo sapiens
cttttgttcattcat

SEQ ID NO: 45133 - DNA, 15 bp, Homo sapiens
ttttgttcattcatt

SEQ ID NO: 45134 - DNA, 15 bp, Homo sapiens
tttgttcattcattc

SEQ ID NO: 45135 - DNA, 15 bp, Homo sapiens
ttgttcattcattca

SEQ ID NO: 45136 - DNA, 15 bp, Homo sapiens
tgttcattcattcat

SEQ ID NO: 45137 - DNA, 15 bp, Homo sapiens
gttcattcattcatc

SEQ ID NO: 45138 - DNA, 15 bp, Homo sapiens
ttcattcattcatca

SEQ ID NO: 45139 - DNA, 15 bp, Homo sapiens
tcattcattcatcac

SEQ ID NO: 45140 - DNA, 15 bp, Homo sapiens
cattcattcatcaca

SEQ ID NO: 45141 - DNA, 15 bp, Homo sapiens
attcattcatcacac

SEQ ID NO: 45142 - DNA, 15 bp, Homo sapiens
ttcattcatcacaca

SEQ ID NO: 45143 - DNA, 15 bp, Homo sapiens
tcattcatcacacat

SEQ ID NO: 45144 - DNA, 15 bp, Homo sapiens
cattcatcacacatg

SEQ ID NO: 45145 - DNA, 15 bp, Homo sapiens
attcatcacacatga

SEQ ID NO: 45146 - DNA, 15 bp, Homo sapiens
ttcatcacacatgaa

SEQ ID NO: 45147 - DNA, 15 bp, Homo sapiens
tcatcacacatgaag

SEQ ID NO: 45148 - DNA, 15 bp, Homo sapiens
catcacacatgaagt

SEQ ID NO: 45149 - DNA, 15 bp, Homo sapiens
atcacacatgaagtc

SEQ ID NO: 45150 - DNA, 15 bp, Homo sapiens
tcacacatgaagtct

SEQ ID NO: 45151 - DNA, 15 bp, Homo sapiens
cacacatgaagtcta

SEQ ID NO: 45152 - DNA, 15 bp, Homo sapiens
acacatgaagtctac

SEQ ID NO: 45153 - DNA, 15 bp, Homo sapiens
cacatgaagtctact

SEQ ID NO: 45154 - DNA, 15 bp, Homo sapiens
acatgaagtctactt

SEQ ID NO: 45155 - DNA, 15 bp, Homo sapiens
catgaagtctacttt

SEQ ID NO: 45156 - DNA, 15 bp, Homo sapiens
atgaagtctactttc

SEQ ID NO: 45157 - DNA, 15 bp, Homo sapiens
tgaagtctactttcc

SEQ ID NO: 45158 - DNA, 15 bp, Homo sapiens
gaagtctactttcca

SEQ ID NO: 45159 - DNA, 15 bp, Homo sapiens
aagtctactttccag

SEQ ID NO: 45160 - DNA, 15 bp, Homo sapiens
agtctactttccagt

SEQ ID NO: 45161 - DNA, 15 bp, Homo sapiens
gtctactttccagtc

SEQ ID NO: 45162 - DNA, 15 bp, Homo sapiens
tctactttccagtct

SEQ ID NO: 45163 - DNA, 15 bp, Homo sapiens
ctactttccagtctt

SEQ ID NO: 45164 - DNA, 15 bp, Homo sapiens
tactttccagtctta

SEQ ID NO: 45165 - DNA, 15 bp, Homo sapiens
actttccagtcttac

SEQ ID NO: 45166 - DNA, 15 bp, Homo sapiens
ctttccagtcttact

SEQ ID NO: 45167 - DNA, 15 bp, Homo sapiens
tttccagtcttactt

SEQ ID NO: 45168 - DNA, 15 bp, Homo sapiens
ttccagtcttactta

SEQ ID NO: 45169 - DNA, 15 bp, Homo sapiens
tccagtcttacttac

SEQ ID NO: 45170 - DNA, 15 bp, Homo sapiens
ccagtcttacttacc

SEQ ID NO: 45171 - DNA, 15 bp, Homo sapiens
cagtcttacttacct

SEQ ID NO: 45172 - DNA, 15 bp, Homo sapiens
agtcttacttacctc

SEQ ID NO: 45173 - DNA, 15 bp, Homo sapiens
gtcttacttacctcc

SEQ ID NO: 45174 - DNA, 15 bp, Homo sapiens
tcttacttacctccc

SEQ ID NO: 45175 - DNA, 15 bp, Homo sapiens
cttacttacctccct

SEQ ID NO: 45176 - DNA, 15 bp, Homo sapiens
ttacttacctccctc

SEQ ID NO: 45177 - DNA, 15 bp, Homo sapiens
tacttacctccctcc

SEQ ID NO: 45178 - DNA, 15 bp, Homo sapiens
acttacctccctccc

SEQ ID NO: 45179 - DNA, 15 bp, Homo sapiens
cttacctccctccct

SEQ ID NO: 45180 - DNA, 15 bp, Homo sapiens
ttacctccctcccta

SEQ ID NO: 45181 - DNA, 15 bp, Homo sapiens
tacctccctccctag

SEQ ID NO: 45182 - DNA, 15 bp, Homo sapiens
acctccctccctagg

SEQ ID NO: 45183 - DNA, 15 bp, Homo sapiens
cctccctccctagga

SEQ ID NO: 45184 - DNA, 15 bp, Homo sapiens
ctccctccctaggag

SEQ ID NO: 45185 - DNA, 15 bp, Homo sapiens
tccctccctaggagg

SEQ ID NO: 45186 - DNA, 15 bp, Homo sapiens
ccctccctaggaggg

SEQ ID NO: 45187 - DNA, 15 bp, Homo sapiens
cctccctaggaggga

SEQ ID NO: 45188 - DNA, 15 bp, Homo sapiens
ctccctaggagggag

SEQ ID NO: 45189 - DNA, 15 bp, Homo sapiens
tccctaggagggagg

SEQ ID NO: 45190 - DNA, 15 bp, Homo sapiens
ccctaggagggaggt

SEQ ID NO: 45191 - DNA, 15 bp, Homo sapiens
cctaggagggaggta

SEQ ID NO: 45192 - DNA, 15 bp, Homo sapiens
ctaggagggaggtag

SEQ ID NO: 45193 - DNA, 15 bp, Homo sapiens
taggagggaggtagg

SEQ ID NO: 45194 - DNA, 15 bp, Homo sapiens
aggagggaggtagga

SEQ ID NO: 45195 - DNA, 15 bp, Homo sapiens
ggagggaggtaggac

SEQ ID NO: 45196 - DNA, 15 bp, Homo sapiens
gagggaggtaggaca

SEQ ID NO: 45197 - DNA, 15 bp, Homo sapiens
agggaggtaggacat

SEQ ID NO: 45198 - DNA, 15 bp, Homo sapiens
gggaggtaggacata

SEQ ID NO: 45199 - DNA, 15 bp, Homo sapiens
ggaggtaggacatac

SEQ ID NO: 45200 - DNA, 15 bp, Homo sapiens
gaggtaggacatacg

SEQ ID NO: 45201 - DNA, 15 bp, Homo sapiens
aggtaggacatacgt

SEQ ID NO: 45202 - DNA, 15 bp, Homo sapiens
ggtaggacatacgta

SEQ ID NO: 45203 - DNA, 15 bp, Homo sapiens
gtaggacatacgtaa

SEQ ID NO: 45204 - DNA, 15 bp, Homo sapiens
taggacatacgtaac

SEQ ID NO: 45205 - DNA, 15 bp, Homo sapiens
aggacatacgtaact

SEQ ID NO: 45206 - DNA, 15 bp, Homo sapiens
ggacatacgtaacta

SEQ ID NO: 45207 - DNA, 15 bp, Homo sapiens
gacatacgtaactag

SEQ ID NO: 45208 - DNA, 15 bp, Homo sapiens
acatacgtaactaga

SEQ ID NO: 45209 - DNA, 15 bp, Homo sapiens
catacgtaactagaa

SEQ ID NO: 45210 - DNA, 15 bp, Homo sapiens
atacgtaactagaat

SEQ ID NO: 45211 - DNA, 15 bp, Homo sapiens
tacgtaactagaata

SEQ ID NO: 45212 - DNA, 15 bp, Homo sapiens
acgtaactagaatat

SEQ ID NO: 45213 - DNA, 15 bp, Homo sapiens
cgtaactagaatata

SEQ ID NO: 45214 - DNA, 15 bp, Homo sapiens
gtaactagaatataa

SEQ ID NO: 45215 - DNA, 15 bp, Homo sapiens
taactagaatataaa

SEQ ID NO: 45216 - DNA, 15 bp, Homo sapiens
aactagaatataaag

SEQ ID NO: 45217 - DNA, 15 bp, Homo sapiens
actagaatataaagg

SEQ ID NO: 45218 - DNA, 15 bp, Homo sapiens
ctagaatataaaggt

SEQ ID NO: 45219 - DNA, 15 bp, Homo sapiens
tagaatataaaggta

SEQ ID NO: 45220 - DNA, 15 bp, Homo sapiens
agaatataaaggtag

SEQ ID NO: 45221 - DNA, 15 bp, Homo sapiens
gaatataaaggtaga

SEQ ID NO: 45222 - DNA, 15 bp, Homo sapiens
aatataaaggtagaa

SEQ ID NO: 45223 - DNA, 15 bp, Homo sapiens
atataaaggtagaaa

SEQ ID NO: 45224 - DNA, 15 bp, Homo sapiens
tataaaggtagaaat

SEQ ID NO: 45225 - DNA, 15 bp, Homo sapiens
ataaaggtagaaatg

SEQ ID NO: 45226 - DNA, 15 bp, Homo sapiens
taaaggtagaaatga

SEQ ID NO: 45227 - DNA, 15 bp, Homo sapiens
aaaggtagaaatgac

SEQ ID NO: 45228 - DNA, 15 bp, Homo sapiens
aaggtagaaatgacc

SEQ ID NO: 45229 - DNA, 15 bp, Homo sapiens
aggtagaaatgaccc

SEQ ID NO: 45230 - DNA, 15 bp, Homo sapiens
ggtagaaatgaccca

SEQ ID NO: 45231 - DNA, 15 bp, Homo sapiens
gtagaaatgacccag

SEQ ID NO: 45232 - DNA, 15 bp, Homo sapiens
tagaaatgacccaga

SEQ ID NO: 45233 - DNA, 15 bp, Homo sapiens
agaaatgacccagaa

SEQ ID NO: 45234 - DNA, 15 bp, Homo sapiens
gaaatgacccagaaa

SEQ ID NO: 45235 - DNA, 15 bp, Homo sapiens
aaatgacccagaaaa

SEQ ID NO: 45236 - DNA, 15 bp, Homo sapiens
aatgacccagaaaag

SEQ ID NO: 45237 - DNA, 15 bp, Homo sapiens
atgacccagaaaagg

SEQ ID NO: 45238 - DNA, 15 bp, Homo sapiens
tgacccagaaaaggt

SEQ ID NO: 45239 - DNA, 15 bp, Homo sapiens
gacccagaaaaggta

SEQ ID NO: 45240 - DNA, 15 bp, Homo sapiens
acccagaaaaggtac

SEQ ID NO: 45241 - DNA, 15 bp, Homo sapiens
cccagaaaaggtaca

SEQ ID NO: 45242 - DNA, 15 bp, Homo sapiens
ccagaaaaggtacag

SEQ ID NO: 45243 - DNA, 15 bp, Homo sapiens
cagaaaaggtacaga

SEQ ID NO: 45244 - DNA, 15 bp, Homo sapiens
agaaaaggtacagat

SEQ ID NO: 45245 - DNA, 15 bp, Homo sapiens
gaaaaggtacagata

SEQ ID NO: 45246 - DNA, 15 bp, Homo sapiens
aaaaggtacagatac

SEQ ID NO: 45247 - DNA, 15 bp, Homo sapiens
aaaggtacagataca

SEQ ID NO: 45248 - DNA, 15 bp, Homo sapiens
aaggtacagatacaa

SEQ ID NO: 45249 - DNA, 15 bp, Homo sapiens
aggtacagatacaat

SEQ ID NO: 45250 - DNA, 15 bp, Homo sapiens
ggtacagatacaatt

SEQ ID NO: 45251 - DNA, 15 bp, Homo sapiens
gtacagatacaattt

SEQ ID NO: 45252 - DNA, 15 bp, Homo sapiens
tacagatacaatttt

SEQ ID NO: 45253 - DNA, 15 bp, Homo sapiens
acagatacaatttta

SEQ ID NO: 45254 - DNA, 15 bp, Homo sapiens
cagatacaattttat

SEQ ID NO: 45255 - DNA, 15 bp, Homo sapiens
agatacaattttata

SEQ ID NO: 45256 - DNA, 15 bp, Homo sapiens
gatacaattttataa

SEQ ID NO: 45257 - DNA, 15 bp, Homo sapiens
atacaattttataaa

SEQ ID NO: 45258 - DNA, 15 bp, Homo sapiens
tacaattttataaag

SEQ ID NO: 45259 - DNA, 15 bp, Homo sapiens
acaattttataaaga

SEQ ID NO: 45260 - DNA, 15 bp, Homo sapiens
caattttataaagag

SEQ ID NO: 45261 - DNA, 15 bp, Homo sapiens
aattttataaagaga

SEQ ID NO: 45262 - DNA, 15 bp, Homo sapiens
attttataaagagaa

SEQ ID NO: 45263 - DNA, 15 bp, Homo sapiens
tttataaagagaaag

SEQ ID NO: 45264 - DNA, 15 bp, Homo sapiens
ttataaagagaaaga

SEQ ID NO: 45265 - DNA, 15 bp, Homo sapiens
tataaagagaaagaa

SEQ ID NO: 45266 - DNA, 15 bp, Homo sapiens
ataaagagaaagaag

SEQ ID NO: 45267 - DNA, 15 bp, Homo sapiens
taaagagaaagaagt

SEQ ID NO: 45268 - DNA, 15 bp, Homo sapiens
aaagagaaagaagtt

SEQ ID NO: 45269 - DNA, 15 bp, Homo sapiens
aagagaaagaagtta

SEQ ID NO: 45270 - DNA, 15 bp, Homo sapiens
agagaaagaagttac

SEQ ID NO: 45271 - DNA, 15 bp, Homo sapiens
gagaaagaagttact

SEQ ID NO: 45272 - DNA, 15 bp, Homo sapiens
agaaagaagttactt

SEQ ID NO: 45273 - DNA, 15 bp, Homo sapiens
gaaagaagttacttc

SEQ ID NO: 45274 - DNA, 15 bp, Homo sapiens
aaagaagttacttcc

SEQ ID NO: 45275 - DNA, 15 bp, Homo sapiens
aagaagttacttcca

SEQ ID NO: 45276 - DNA, 15 bp, Homo sapiens
agaagttacttccag

SEQ ID NO: 45277 - DNA, 15 bp, Homo sapiens
gaagttacttccagt

SEQ ID NO: 45278 - DNA, 15 bp, Homo sapiens
aagttacttccagtt

SEQ ID NO: 45279 - DNA, 15 bp, Homo sapiens
agttacttccagtta

SEQ ID NO: 45280 - DNA, 15 bp, Homo sapiens
gttacttccagttag

SEQ ID NO: 45281 - DNA, 15 bp, Homo sapiens
ttacttccagttagg

SEQ ID NO: 45282 - DNA, 15 bp, Homo sapiens
tacttccagttaggg

SEQ ID NO: 45283 - DNA, 15 bp, Homo sapiens
acttccagttaggga

SEQ ID NO: 45284 - DNA, 15 bp, Homo sapiens
cttccagttagggaa

SEQ ID NO: 45285 - DNA, 15 bp, Homo sapiens
ttccagttagggaat

SEQ ID NO: 45286 - DNA, 15 bp, Homo sapiens
tccagttagggaata

SEQ ID NO: 45287 - DNA, 15 bp, Homo sapiens
ccagttagggaataa

SEQ ID NO: 45288 - DNA, 15 bp, Homo sapiens
cagttagggaataaa

SEQ ID NO: 45289 - DNA, 15 bp, Homo sapiens
agttagggaataaag

SEQ ID NO: 45290 - DNA, 15 bp, Homo sapiens
gttagggaataaagg

SEQ ID NO: 45291 - DNA, 15 bp, Homo sapiens
ttagggaataaagga

SEQ ID NO: 45292 - DNA, 15 bp, Homo sapiens
tagggaataaaggaa

SEQ ID NO: 45293 - DNA, 15 bp, Homo sapiens
agggaataaaggaat

SEQ ID NO: 45294 - DNA, 15 bp, Homo sapiens
gggaataaaggaatg

SEQ ID NO: 45295 - DNA, 15 bp, Homo sapiens
ggaataaaggaatgc

SEQ ID NO: 45296 - DNA, 15 bp, Homo sapiens
gaataaaggaatgca

SEQ ID NO: 45297 - DNA, 15 bp, Homo sapiens
aataaaggaatgcat

SEQ ID NO: 45298 - DNA, 15 bp, Homo sapiens
ataaaggaatgcatt

SEQ ID NO: 45299 - DNA, 15 bp, Homo sapiens
taaaggaatgcattg

SEQ ID NO: 45300 - DNA, 15 bp, Homo sapiens
aaaggaatgcattgt

SEQ ID NO: 45301 - DNA, 15 bp, Homo sapiens
aaggaatgcattgtc

SEQ ID NO: 45302 - DNA, 15 bp, Homo sapiens
aggaatgcattgtca

SEQ ID NO: 45303 - DNA, 15 bp, Homo sapiens
ggaatgcattgtcaa

SEQ ID NO: 45304 - DNA, 15 bp, Homo sapiens
gaatgcattgtcaag

SEQ ID NO: 45305 - DNA, 15 bp, Homo sapiens
aatgcattgtcaaga

SEQ ID NO: 45306 - DNA, 15 bp, Homo sapiens
atgcattgtcaagaa

SEQ ID NO: 45307 - DNA, 15 bp, Homo sapiens
tgcattgtcaagaag

SEQ ID NO: 45308 - DNA, 15 bp, Homo sapiens
gcattgtcaagaagg

SEQ ID NO: 45309 - DNA, 15 bp, Homo sapiens
cattgtcaagaaggt

SEQ ID NO: 45310 - DNA, 15 bp, Homo sapiens
attgtcaagaaggtt

SEQ ID NO: 45311 - DNA, 15 bp, Homo sapiens
ttgtcaagaaggttg

SEQ ID NO: 45312 - DNA, 15 bp, Homo sapiens
tgtcaagaaggttgc

SEQ ID NO: 45313 - DNA, 15 bp, Homo sapiens
gtcaagaaggttgca

SEQ ID NO: 45314 - DNA, 15 bp, Homo sapiens
tcaagaaggttgcaa

SEQ ID NO: 45315 - DNA, 15 bp, Homo sapiens
caagaaggttgcaaa

SEQ ID NO: 45316 - DNA, 15 bp, Homo sapiens
aagaaggttgcaaag

SEQ ID NO: 45317 - DNA, 15 bp, Homo sapiens
agaaggttgcaaagg

SEQ ID NO: 45318 - DNA, 15 bp, Homo sapiens
gaaggttgcaaaggg

SEQ ID NO: 45319 - DNA, 15 bp, Homo sapiens
aaggttgcaaagggc

SEQ ID NO: 45320 - DNA, 15 bp, Homo sapiens
aggttgcaaagggcc

SEQ ID NO: 45321 - DNA, 15 bp, Homo sapiens
ggttgcaaagggcca

SEQ ID NO: 45322 - DNA, 15 bp, Homo sapiens
gttgcaaagggccag

SEQ ID NO: 45323 - DNA, 15 bp, Homo sapiens
ttgcaaagggccagg

SEQ ID NO: 45324 - DNA, 15 bp, Homo sapiens
tgcaaagggccaggt

SEQ ID NO: 45325 - DNA, 15 bp, Homo sapiens
gcaaagggccaggtg

SEQ ID NO: 45326 - DNA, 15 bp, Homo sapiens
caaagggccaggtgc

SEQ ID NO: 45327 - DNA, 15 bp, Homo sapiens
aaagggccaggtgca

SEQ ID NO: 45328 - DNA, 15 bp, Homo sapiens
aagggccaggtgcag

SEQ ID NO: 45329 - DNA, 15 bp, Homo sapiens
agggccaggtgcagt

SEQ ID NO: 45330 - DNA, 15 bp, Homo sapiens
gggccaggtgcagtg

SEQ ID NO: 45331 - DNA, 15 bp, Homo sapiens
gtgcagtggctcaca

SEQ ID NO: 45332 - DNA, 15 bp, Homo sapiens
tgcagtggctcacat

SEQ ID NO: 45333 - DNA, 15 bp, Homo sapiens
gcagtggctcacatt

SEQ ID NO: 45334 - DNA, 15 bp, Homo sapiens
cagtggctcacattt

SEQ ID NO: 45335 - DNA, 15 bp, Homo sapiens
agtggctcacatttg

SEQ ID NO: 45336 - DNA, 15 bp, Homo sapiens
gtggctcacatttgt

SEQ ID NO: 45337 - DNA, 15 bp, Homo sapiens
tggctcacatttgta

SEQ ID NO: 45338 - DNA, 15 bp, Homo sapiens
ggctcacatttgtaa

SEQ ID NO: 45339 - DNA, 15 bp, Homo sapiens
gctcacatttgtaat

SEQ ID NO: 45340 - DNA, 15 bp, Homo sapiens
ctcacatttgtaatc

SEQ ID NO: 45341 - DNA, 15 bp, Homo sapiens
tcacatttgtaatcc

SEQ ID NO: 45342 - DNA, 15 bp, Homo sapiens
cacatttgtaatccc

SEQ ID NO: 45343 - DNA, 15 bp, Homo sapiens
acatttgtaatccca

SEQ ID NO: 45344 - DNA, 15 bp, Homo sapiens
catttgtaatcccaa

SEQ ID NO: 45345 - DNA, 15 bp, Homo sapiens
atttgtaatcccaac

SEQ ID NO: 45346 - DNA, 15 bp, Homo sapiens
tttgtaatcccaaca

SEQ ID NO: 45347 - DNA, 15 bp, Homo sapiens
ttgtaatcccaacac

SEQ ID NO: 45348 - DNA, 15 bp, Homo sapiens
tgtaatcccaacact

SEQ ID NO: 45349 - DNA, 15 bp, Homo sapiens
gtaatcccaacactt

SEQ ID NO: 45350 - DNA, 15 bp, Homo sapiens
taatcccaacacttt

SEQ ID NO: 45351 - DNA, 15 bp, Homo sapiens
aatcccaacactttg

SEQ ID NO: 45352 - DNA, 15 bp, Homo sapiens
atcccaacactttgg

SEQ ID NO: 45353 - DNA, 15 bp, Homo sapiens
tcccaacactttggg

SEQ ID NO: 45354 - DNA, 15 bp, Homo sapiens
cccaacactttggga

SEQ ID NO: 45355 - DNA, 15 bp, Homo sapiens
ccaacactttgggag

SEQ ID NO: 45356 - DNA, 15 bp, Homo sapiens
caacactttgggagg

SEQ ID NO: 45357 - DNA, 15 bp, Homo sapiens
aacactttgggaggc

SEQ ID NO: 45358 - DNA, 15 bp, Homo sapiens
acactttgggaggcc

SEQ ID NO: 45359 - DNA, 15 bp, Homo sapiens
gaggccgaggcggga

SEQ ID NO: 45360 - DNA, 15 bp, Homo sapiens
aggccgaggcgggag

SEQ ID NO: 45361 - DNA, 15 bp, Homo sapiens
ggccgaggcgggagg

SEQ ID NO: 45362 - DNA, 15 bp, Homo sapiens
gccgaggcgggagga

SEQ ID NO: 45363 - DNA, 15 bp, Homo sapiens
ccgaggcgggaggat

SEQ ID NO: 45364 - DNA, 15 bp, Homo sapiens
cgaggcgggaggatc

SEQ ID NO: 45365 - DNA, 15 bp, Homo sapiens
gaggcgggaggatca

SEQ ID NO: 45366 - DNA, 15 bp, Homo sapiens
aggcgggaggatcac

SEQ ID NO: 45367 - DNA, 15 bp, Homo sapiens
ggcgggaggatcact

SEQ ID NO: 45368 - DNA, 15 bp, Homo sapiens
gcgggaggatcacta

SEQ ID NO: 45369 - DNA, 15 bp, Homo sapiens
cgggaggatcactag

SEQ ID NO: 45370 - DNA, 15 bp, Homo sapiens
gggaggatcactaga

SEQ ID NO: 45371 - DNA, 15 bp, Homo sapiens
ggaggatcactagag

SEQ ID NO: 45372 - DNA, 15 bp, Homo sapiens
gaggatcactagagc

SEQ ID NO: 45373 - DNA, 15 bp, Homo sapiens
aggatcactagagcc

SEQ ID NO: 45374 - DNA, 15 bp, Homo sapiens
ggatcactagagccc

SEQ ID NO: 45375 - DNA, 15 bp, Homo sapiens
gatcactagagccca

SEQ ID NO: 45376 - DNA, 15 bp, Homo sapiens
atcactagagcccag

SEQ ID NO: 45377 - DNA, 15 bp, Homo sapiens
tcactagagcccagg

SEQ ID NO: 45378 - DNA, 15 bp, Homo sapiens
cactagagcccagga

SEQ ID NO: 45379 - DNA, 15 bp, Homo sapiens
actagagcccaggaa

SEQ ID NO: 45380 - DNA, 15 bp, Homo sapiens
ctagagcccaggaat

SEQ ID NO: 45381 - DNA, 15 bp, Homo sapiens
tagagcccaggaatt

SEQ ID NO: 45382 - DNA, 15 bp, Homo sapiens
agagcccaggaattc

SEQ ID NO: 45383 - DNA, 15 bp, Homo sapiens
gagcccaggaattcg

SEQ ID NO: 45384 - DNA, 15 bp, Homo sapiens
agcccaggaattcga

SEQ ID NO: 45385 - DNA, 15 bp, Homo sapiens
gcccaggaattcgag

SEQ ID NO: 45386 - DNA, 15 bp, Homo sapiens
cccaggaattcgaga

SEQ ID NO: 45387 - DNA, 15 bp, Homo sapiens
ccaggaattcgagat

SEQ ID NO: 45388 - DNA, 15 bp, Homo sapiens
caggaattcgagatc

SEQ ID NO: 45389 - DNA, 15 bp, Homo sapiens
aggaattcgagatca

SEQ ID NO: 45390 - DNA, 15 bp, Homo sapiens
ggaattcgagatcaa

SEQ ID NO: 45391 - DNA, 15 bp, Homo sapiens
gaattcgagatcaac

SEQ ID NO: 45392 - DNA, 15 bp, Homo sapiens
aattcgagatcaacc

SEQ ID NO: 45393 - DNA, 15 bp, Homo sapiens
attcgagatcaacct

SEQ ID NO: 45394 - DNA, 15 bp, Homo sapiens
ttcgagatcaacctg

SEQ ID NO: 45395 - DNA, 15 bp, Homo sapiens
tcgagatcaacctgg

SEQ ID NO: 45396 - DNA, 15 bp, Homo sapiens
cgagatcaacctggg

SEQ ID NO: 45397 - DNA, 15 bp, Homo sapiens
gagatcaacctgggc

SEQ ID NO: 45398 - DNA, 15 bp, Homo sapiens
agatcaacctgggca

SEQ ID NO: 45399 - DNA, 15 bp, Homo sapiens
gatcaacctgggcaa

SEQ ID NO: 45400 - DNA, 15 bp, Homo sapiens
atcaacctgggcaac

SEQ ID NO: 45401 - DNA, 15 bp, Homo sapiens
tcaacctgggcaaca

SEQ ID NO: 45402 - DNA, 15 bp, Homo sapiens
caacctgggcaacac

SEQ ID NO: 45403 - DNA, 15 bp, Homo sapiens
aacctgggcaacaca

SEQ ID NO: 45404 - DNA, 15 bp, Homo sapiens
acctgggcaacacag

SEQ ID NO: 45405 - DNA, 15 bp, Homo sapiens
cctgggcaacacagt

SEQ ID NO: 45406 - DNA, 15 bp, Homo sapiens
ctgggcaacacagtg

SEQ ID NO: 45407 - DNA, 15 bp, Homo sapiens
tgggcaacacagtga

SEQ ID NO: 45408 - DNA, 15 bp, Homo sapiens
gggcaacacagtgag

SEQ ID NO: 45409 - DNA, 15 bp, Homo sapiens
ggcaacacagtgaga

SEQ ID NO: 45410 - DNA, 15 bp, Homo sapiens
gcaacacagtgagac

SEQ ID NO: 45411 - DNA, 15 bp, Homo sapiens
caacacagtgagacc

SEQ ID NO: 45412 - DNA, 15 bp, Homo sapiens
aacacagtgagacca

SEQ ID NO: 45413 - DNA, 15 bp, Homo sapiens
acacagtgagaccat

SEQ ID NO: 45414 - DNA, 15 bp, Homo sapiens
cacagtgagaccatg

SEQ ID NO: 45415 - DNA, 15 bp, Homo sapiens
acagtgagaccatgt

SEQ ID NO: 45416 - DNA, 15 bp, Homo sapiens
cagtgagaccatgtc

SEQ ID NO: 45417 - DNA, 15 bp, Homo sapiens
agtgagaccatgtct

SEQ ID NO: 45418 - DNA, 15 bp, Homo sapiens
gtgagaccatgtctc

SEQ ID NO: 45419 - DNA, 15 bp, Homo sapiens
tgagaccatgtctct

SEQ ID NO: 45420 - DNA, 15 bp, Homo sapiens
gagaccatgtctcta

SEQ ID NO: 45421 - DNA, 15 bp, Homo sapiens
agaccatgtctctac

SEQ ID NO: 45422 - DNA, 15 bp, Homo sapiens
gaccatgtctctaca

SEQ ID NO: 45423 - DNA, 15 bp, Homo sapiens
accatgtctctacaa

SEQ ID NO: 45424 - DNA, 15 bp, Homo sapiens
ccatgtctctacaaa

SEQ ID NO: 45425 - DNA, 15 bp, Homo sapiens
catgtctctacaaaa

SEQ ID NO: 45426 - DNA, 15 bp, Homo sapiens
atgtctctacaaaaa

SEQ ID NO: 45427 - DNA, 15 bp, Homo sapiens
tgtctctacaaaaac

SEQ ID NO: 45428 - DNA, 15 bp, Homo sapiens
gtctctacaaaaact

SEQ ID NO: 45429 - DNA, 15 bp, Homo sapiens
tctctacaaaaactt

SEQ ID NO: 45430 - DNA, 15 bp, Homo sapiens
ctctacaaaaactta

SEQ ID NO: 45431 - DNA, 15 bp, Homo sapiens
tctacaaaaacttaa

SEQ ID NO: 45432 - DNA, 15 bp, Homo sapiens
ctacaaaaacttaaa

SEQ ID NO: 45433 - DNA, 15 bp, Homo sapiens
tacaaaaacttaaaa

SEQ ID NO: 45434 - DNA, 15 bp, Homo sapiens
acaaaaacttaaaaa

SEQ ID NO: 45435 - DNA, 15 bp, Homo sapiens
caaaaacttaaaaat

SEQ ID NO: 45436 - DNA, 15 bp, Homo sapiens
aaaaacttaaaaatt

SEQ ID NO: 45437 - DNA, 15 bp, Homo sapiens
aaaacttaaaaatta

SEQ ID NO: 45438 - DNA, 15 bp, Homo sapiens
aacttaaaaattaaa

SEQ ID NO: 45439 - DNA, 15 bp, Homo sapiens
acttaaaaattaaaa

SEQ ID NO: 45440 - DNA, 15 bp, Homo sapiens
cttaaaaattaaaaa

SEQ ID NO: 45441 - DNA, 15 bp, Homo sapiens
ttaaaaattaaaaaa

SEQ ID NO: 45442 - DNA, 15 bp, Homo sapiens
taaaaattaaaaaaa

SEQ ID NO: 45443 - DNA, 15 bp, Homo sapiens
aaattaaaaaaatta

SEQ ID NO: 45444 - DNA, 15 bp, Homo sapiens
aattaaaaaaattag

SEQ ID NO: 45445 - DNA, 15 bp, Homo sapiens
attaaaaaaattagg

SEQ ID NO: 45446 - DNA, 15 bp, Homo sapiens
ttaaaaaaattaggt

SEQ ID NO: 45447 - DNA, 15 bp, Homo sapiens
taaaaaaattaggtg

SEQ ID NO: 45448 - DNA, 15 bp, Homo sapiens
aaaaaaattaggtgt

SEQ ID NO: 45449 - DNA, 15 bp, Homo sapiens
aaaaaattaggtgtg

SEQ ID NO: 45450 - DNA, 15 bp, Homo sapiens
aaaaattaggtgtgg

SEQ ID NO: 45451 - DNA, 15 bp, Homo sapiens
aaaattaggtgtggt

SEQ ID NO: 45452 - DNA, 15 bp, Homo sapiens
aaattaggtgtggtg

SEQ ID NO: 45453 - DNA, 15 bp, Homo sapiens
aattaggtgtggtgg

SEQ ID NO: 45454 - DNA, 15 bp, Homo sapiens
attaggtgtggtggt

SEQ ID NO: 45455 - DNA, 15 bp, Homo sapiens
ttaggtgtggtggtg

SEQ ID NO: 45456 - DNA, 15 bp, Homo sapiens
taggtgtggtggtgc

SEQ ID NO: 45457 - DNA, 15 bp, Homo sapiens
aggtgtggtggtgca

SEQ ID NO: 45458 - DNA, 15 bp, Homo sapiens
ggtgtggtggtgcac

SEQ ID NO: 45459 - DNA, 15 bp, Homo sapiens
gtgtggtggtgcaca

SEQ ID NO: 45460 - DNA, 15 bp, Homo sapiens
tgtggtggtgcacac

SEQ ID NO: 45461 - DNA, 15 bp, Homo sapiens
gtggtggtgcacacc

SEQ ID NO: 45462 - DNA, 15 bp, Homo sapiens
tggtggtgcacacct

SEQ ID NO: 45463 - DNA, 15 bp, Homo sapiens
ggtggtgcacacctg

SEQ ID NO: 45464 - DNA, 15 bp, Homo sapiens
gtggtgcacacctgt

SEQ ID NO: 45465 - DNA, 15 bp, Homo sapiens
tggtgcacacctgta

SEQ ID NO: 45466 - DNA, 15 bp, Homo sapiens
ggtgcacacctgtag

SEQ ID NO: 45467 - DNA, 15 bp, Homo sapiens
gtgcacacctgtagt

SEQ ID NO: 45468 - DNA, 15 bp, Homo sapiens
tgcacacctgtagtt

SEQ ID NO: 45469 - DNA, 15 bp, Homo sapiens
gcacacctgtagttt

SEQ ID NO: 45470 - DNA, 15 bp, Homo sapiens
cacacctgtagtttc

SEQ ID NO: 45471 - DNA, 15 bp, Homo sapiens
acacctgtagtttca

SEQ ID NO: 45472 - DNA, 15 bp, Homo sapiens
cacctgtagtttcag

SEQ ID NO: 45473 - DNA, 15 bp, Homo sapiens
acctgtagtttcagc

SEQ ID NO: 45474 - DNA, 15 bp, Homo sapiens
cctgtagtttcagct

SEQ ID NO: 45475 - DNA, 15 bp, Homo sapiens
ctgtagtttcagcta

SEQ ID NO: 45476 - DNA, 15 bp, Homo sapiens
tgtagtttcagctac

SEQ ID NO: 45477 - DNA, 15 bp, Homo sapiens
gtagtttcagctact

SEQ ID NO: 45478 - DNA, 15 bp, Homo sapiens
tagtttcagctactt

SEQ ID NO: 45479 - DNA, 15 bp, Homo sapiens
agtttcagctacttg

SEQ ID NO: 45480 - DNA, 15 bp, Homo sapiens
gtttcagctacttgg

SEQ ID NO: 45481 - DNA, 15 bp, Homo sapiens
tttcagctacttggg

SEQ ID NO: 45482 - DNA, 15 bp, Homo sapiens
ttcagctacttggga

SEQ ID NO: 45483 - DNA, 15 bp, Homo sapiens
gaggtgggaggatta

SEQ ID NO: 45484 - DNA, 15 bp, Homo sapiens
aggtgggaggattac

SEQ ID NO: 45485 - DNA, 15 bp, Homo sapiens
ggtgggaggattact

SEQ ID NO: 45486 - DNA, 15 bp, Homo sapiens
gtgggaggattactt

SEQ ID NO: 45487 - DNA, 15 bp, Homo sapiens
tgggaggattacttg

SEQ ID NO: 45488 - DNA, 15 bp, Homo sapiens
gggaggattacttga

SEQ ID NO: 45489 - DNA, 15 bp, Homo sapiens
ggaggattacttgag

SEQ ID NO: 45490 - DNA, 15 bp, Homo sapiens
gaggattacttgagt

SEQ ID NO: 45491 - DNA, 15 bp, Homo sapiens
aggattacttgagtc

SEQ ID NO: 45492 - DNA, 15 bp, Homo sapiens
ggattacttgagtct

SEQ ID NO: 45493 - DNA, 15 bp, Homo sapiens
gattacttgagtcta

SEQ ID NO: 45494 - DNA, 15 bp, Homo sapiens
attacttgagtctaa

SEQ ID NO: 45495 - DNA, 15 bp, Homo sapiens
ttacttgagtctaag

SEQ ID NO: 45496 - DNA, 15 bp, Homo sapiens
tacttgagtctaaga

SEQ ID NO: 45497 - DNA, 15 bp, Homo sapiens
acttgagtctaagaa

SEQ ID NO: 45498 - DNA, 15 bp, Homo sapiens
cttgagtctaagaag

SEQ ID NO: 45499 - DNA, 15 bp, Homo sapiens
ttgagtctaagaagt

SEQ ID NO: 45500 - DNA, 15 bp, Homo sapiens
tgagtctaagaagtt

SEQ ID NO: 45501 - DNA, 15 bp, Homo sapiens
gagtctaagaagttg

SEQ ID NO: 45502 - DNA, 15 bp, Homo sapiens
agtctaagaagttga

SEQ ID NO: 45503 - DNA, 15 bp, Homo sapiens
gtctaagaagttgag

SEQ ID NO: 45504 - DNA, 15 bp, Homo sapiens
tctaagaagttgagg

SEQ ID NO: 45505 - DNA, 15 bp, Homo sapiens
ctaagaagttgaggc

SEQ ID NO: 45506 - DNA, 15 bp, Homo sapiens
taagaagttgaggct

SEQ ID NO: 45507 - DNA, 15 bp, Homo sapiens
aagaagttgaggcta

SEQ ID NO: 45508 - DNA, 15 bp, Homo sapiens
agaagttgaggctac

SEQ ID NO: 45509 - DNA, 15 bp, Homo sapiens
gaagttgaggctaca

SEQ ID NO: 45510 - DNA, 15 bp, Homo sapiens
aagttgaggctacag

SEQ ID NO: 45511 - DNA, 15 bp, Homo sapiens
agttgaggctacagt

SEQ ID NO: 45512 - DNA, 15 bp, Homo sapiens
gttgaggctacagtg

SEQ ID NO: 45513 - DNA, 15 bp, Homo sapiens
ttgaggctacagtga

SEQ ID NO: 45514 - DNA, 15 bp, Homo sapiens
tgaggctacagtgag

SEQ ID NO: 45515 - DNA, 15 bp, Homo sapiens
aggctacagtgagcg

SEQ ID NO: 45516 - DNA, 15 bp, Homo sapiens
ggctacagtgagcga

SEQ ID NO: 45517 - DNA, 15 bp, Homo sapiens
gctacagtgagcgat

SEQ ID NO: 45518 - DNA, 15 bp, Homo sapiens
ctacagtgagcgatt

SEQ ID NO: 45519 - DNA, 15 bp, Homo sapiens
tacagtgagcgattg

SEQ ID NO: 45520 - DNA, 15 bp, Homo sapiens
acagtgagcgattga

SEQ ID NO: 45521 - DNA, 15 bp, Homo sapiens
cagtgagcgattgat

SEQ ID NO: 45522 - DNA, 15 bp, Homo sapiens
agtgagcgattgatc

SEQ ID NO: 45523 - DNA, 15 bp, Homo sapiens
gtgagcgattgatca

SEQ ID NO: 45524 - DNA, 15 bp, Homo sapiens
tgagcgattgatcat

SEQ ID NO: 45525 - DNA, 15 bp, Homo sapiens
gagcgattgatcatg

SEQ ID NO: 45526 - DNA, 15 bp, Homo sapiens
agcgattgatcatgc

SEQ ID NO: 45527 - DNA, 15 bp, Homo sapiens
gcgattgatcatgcc

SEQ ID NO: 45528 - DNA, 15 bp, Homo sapiens
cgattgatcatgcca

SEQ ID NO: 45529 - DNA, 15 bp, Homo sapiens
gattgatcatgccac

SEQ ID NO: 45530 - DNA, 15 bp, Homo sapiens
attgatcatgccact

SEQ ID NO: 45531 - DNA, 15 bp, Homo sapiens
ttgatcatgccactg

SEQ ID NO: 45532 - DNA, 15 bp, Homo sapiens
tgatcatgccactga

SEQ ID NO: 45533 - DNA, 15 bp, Homo sapiens
gatcatgccactgaa

SEQ ID NO: 45534 - DNA, 15 bp, Homo sapiens
atcatgccactgaac

SEQ ID NO: 45535 - DNA, 15 bp, Homo sapiens
tcatgccactgaact

SEQ ID NO: 45536 - DNA, 15 bp, Homo sapiens
catgccactgaactc

SEQ ID NO: 45537 - DNA, 15 bp, Homo sapiens
atgccactgaactcc

SEQ ID NO: 45538 - DNA, 15 bp, Homo sapiens
tgccactgaactcca

SEQ ID NO: 45539 - DNA, 15 bp, Homo sapiens
gccactgaactccag

SEQ ID NO: 45540 - DNA, 15 bp, Homo sapiens
ccactgaactccagc

SEQ ID NO: 45541 - DNA, 15 bp, Homo sapiens
cactgaactccagcc

SEQ ID NO: 45542 - DNA, 15 bp, Homo sapiens
actgaactccagcct

SEQ ID NO: 45543 - DNA, 15 bp, Homo sapiens
ctgaactccagcctg

SEQ ID NO: 45544 - DNA, 15 bp, Homo sapiens
tgaactccagcctgg

SEQ ID NO: 45545 - DNA, 15 bp, Homo sapiens
gaactccagcctggg

SEQ ID NO: 45546 - DNA, 15 bp, Homo sapiens
aactccagcctgggt

SEQ ID NO: 45547 - DNA, 15 bp, Homo sapiens
cctgggtgacagaga

SEQ ID NO: 45548 - DNA, 15 bp, Homo sapiens
ctgggtgacagagac

SEQ ID NO: 45549 - DNA, 15 bp, Homo sapiens
tgggtgacagagaca

SEQ ID NO: 45550 - DNA, 15 bp, Homo sapiens
gggtgacagagacac

SEQ ID NO: 45551 - DNA, 15 bp, Homo sapiens
ggtgacagagacact

SEQ ID NO: 45552 - DNA, 15 bp, Homo sapiens
gtgacagagacacta

SEQ ID NO: 45553 - DNA, 15 bp, Homo sapiens
tgacagagacactat

SEQ ID NO: 45554 - DNA, 15 bp, Homo sapiens
gacagagacactatt

SEQ ID NO: 45555 - DNA, 15 bp, Homo sapiens
acagagacactattg

SEQ ID NO: 45556 - DNA, 15 bp, Homo sapiens
cagagacactattgc

SEQ ID NO: 45557 - DNA, 15 bp, Homo sapiens
agagacactattgcc

SEQ ID NO: 45558 - DNA, 15 bp, Homo sapiens
gagacactattgccc

SEQ ID NO: 45559 - DNA, 15 bp, Homo sapiens
agacactattgccct

SEQ ID NO: 45560 - DNA, 15 bp, Homo sapiens
gacactattgcccta

SEQ ID NO: 45561 - DNA, 15 bp, Homo sapiens
acactattgccctag

SEQ ID NO: 45562 - DNA, 15 bp, Homo sapiens
cactattgccctagg

SEQ ID NO: 45563 - DNA, 15 bp, Homo sapiens
actattgccctagga

SEQ ID NO: 45564 - DNA, 15 bp, Homo sapiens
ctattgccctaggaa

SEQ ID NO: 45565 - DNA, 15 bp, Homo sapiens
tattgccctaggaaa

SEQ ID NO: 45566 - DNA, 15 bp, Homo sapiens
attgccctaggaaag

SEQ ID NO: 45567 - DNA, 15 bp, Homo sapiens
ttgccctaggaaagc

SEQ ID NO: 45568 - DNA, 15 bp, Homo sapiens
tgccctaggaaagca

SEQ ID NO: 45569 - DNA, 15 bp, Homo sapiens
gccctaggaaagcaa

SEQ ID NO: 45570 - DNA, 15 bp, Homo sapiens
ccctaggaaagcaac

SEQ ID NO: 45571 - DNA, 15 bp, Homo sapiens
cctaggaaagcaact

SEQ ID NO: 45572 - DNA, 15 bp, Homo sapiens
ctaggaaagcaactg

SEQ ID NO: 45573 - DNA, 15 bp, Homo sapiens
taggaaagcaactgt

SEQ ID NO: 45574 - DNA, 15 bp, Homo sapiens
aggaaagcaactgtt

SEQ ID NO: 45575 - DNA, 15 bp, Homo sapiens
ggaaagcaactgttt

SEQ ID NO: 45576 - DNA, 15 bp, Homo sapiens
gaaagcaactgtttt

SEQ ID NO: 45577 - DNA, 15 bp, Homo sapiens
aaagcaactgttttg

SEQ ID NO: 45578 - DNA, 15 bp, Homo sapiens
aagcaactgttttgc

SEQ ID NO: 45579 - DNA, 15 bp, Homo sapiens
agcaactgttttgct

SEQ ID NO: 45580 - DNA, 15 bp, Homo sapiens
gcaactgttttgctg

SEQ ID NO: 45581 - DNA, 15 bp, Homo sapiens
caactgttttgctgt

SEQ ID NO: 45582 - DNA, 15 bp, Homo sapiens
aactgttttgctgta

SEQ ID NO: 45583 - DNA, 15 bp, Homo sapiens
actgttttgctgtaa

SEQ ID NO: 45584 - DNA, 15 bp, Homo sapiens
ctgttttgctgtaat

SEQ ID NO: 45585 - DNA, 15 bp, Homo sapiens
tgttttgctgtaatc

SEQ ID NO: 45586 - DNA, 15 bp, Homo sapiens
gttttgctgtaatca

SEQ ID NO: 45587 - DNA, 15 bp, Homo sapiens
ttttgctgtaatcaa

SEQ ID NO: 45588 - DNA, 15 bp, Homo sapiens
tttgctgtaatcaat

SEQ ID NO: 45589 - DNA, 15 bp, Homo sapiens
ttgctgtaatcaatg

SEQ ID NO: 45590 - DNA, 15 bp, Homo sapiens
tgctgtaatcaatga

SEQ ID NO: 45591 - DNA, 15 bp, Homo sapiens
gctgtaatcaatgaa

SEQ ID NO: 45592 - DNA, 15 bp, Homo sapiens
ctgtaatcaatgaag

SEQ ID NO: 45593 - DNA, 15 bp, Homo sapiens
tgtaatcaatgaagg

SEQ ID NO: 45594 - DNA, 15 bp, Homo sapiens
gtaatcaatgaaggc

SEQ ID NO: 45595 - DNA, 15 bp, Homo sapiens
taatcaatgaaggct

SEQ ID NO: 45596 - DNA, 15 bp, Homo sapiens
aatcaatgaaggctc

SEQ ID NO: 45597 - DNA, 15 bp, Homo sapiens
atcaatgaaggctcc

SEQ ID NO: 45598 - DNA, 15 bp, Homo sapiens
tcaatgaaggctccc

SEQ ID NO: 45599 - DNA, 15 bp, Homo sapiens
caatgaaggctcccg

SEQ ID NO: 45600 - DNA, 15 bp, Homo sapiens
aatgaaggctcccga

SEQ ID NO: 45601 - DNA, 15 bp, Homo sapiens
atgaaggctcccgat

SEQ ID NO: 45602 - DNA, 15 bp, Homo sapiens
tgaaggctcccgata

SEQ ID NO: 45603 - DNA, 15 bp, Homo sapiens
gaaggctcccgatag

SEQ ID NO: 45604 - DNA, 15 bp, Homo sapiens
aaggctcccgatagc

SEQ ID NO: 45605 - DNA, 15 bp, Homo sapiens
aggctcccgatagcc

SEQ ID NO: 45606 - DNA, 15 bp, Homo sapiens
ggctcccgatagcca

SEQ ID NO: 45607 - DNA, 15 bp, Homo sapiens
gctcccgatagccag

SEQ ID NO: 45608 - DNA, 15 bp, Homo sapiens
ctcccgatagccaga

SEQ ID NO: 45609 - DNA, 15 bp, Homo sapiens
tcccgatagccagag

SEQ ID NO: 45610 - DNA, 15 bp, Homo sapiens
cccgatagccagagc

SEQ ID NO: 45611 - DNA, 15 bp, Homo sapiens
ccgatagccagagcc

SEQ ID NO: 45612 - DNA, 15 bp, Homo sapiens
cgatagccagagcca

SEQ ID NO: 45613 - DNA, 15 bp, Homo sapiens
gatagccagagccac

SEQ ID NO: 45614 - DNA, 15 bp, Homo sapiens
atagccagagccacc

SEQ ID NO: 45615 - DNA, 15 bp, Homo sapiens
tagccagagccaccc

SEQ ID NO: 45616 - DNA, 15 bp, Homo sapiens
agccagagccaccca

SEQ ID NO: 45617 - DNA, 15 bp, Homo sapiens
gccagagccacccag

SEQ ID NO: 45618 - DNA, 15 bp, Homo sapiens
ccagagccacccaga

SEQ ID NO: 45619 - DNA, 15 bp, Homo sapiens
cagagccacccagaa

SEQ ID NO: 45620 - DNA, 15 bp, Homo sapiens
agagccacccagaat

SEQ ID NO: 45621 - DNA, 15 bp, Homo sapiens
gagccacccagaatt

SEQ ID NO: 45622 - DNA, 15 bp, Homo sapiens
agccacccagaattc

SEQ ID NO: 45623 - DNA, 15 bp, Homo sapiens
gccacccagaattca

SEQ ID NO: 45624 - DNA, 15 bp, Homo sapiens
ccacccagaattcac

SEQ ID NO: 45625 - DNA, 15 bp, Homo sapiens
cacccagaattcaca

SEQ ID NO: 45626 - DNA, 15 bp, Homo sapiens
acccagaattcacag

SEQ ID NO: 45627 - DNA, 15 bp, Homo sapiens
cccagaattcacagt

SEQ ID NO: 45628 - DNA, 15 bp, Homo sapiens
ccagaattcacagtc

SEQ ID NO: 45629 - DNA, 15 bp, Homo sapiens
cagaattcacagtca

SEQ ID NO: 45630 - DNA, 15 bp, Homo sapiens
agaattcacagtcac

SEQ ID NO: 45631 - DNA, 15 bp, Homo sapiens
gaattcacagtcaca

SEQ ID NO: 45632 - DNA, 15 bp, Homo sapiens
aattcacagtcacat

SEQ ID NO: 45633 - DNA, 15 bp, Homo sapiens
attcacagtcacatc

SEQ ID NO: 45634 - DNA, 15 bp, Homo sapiens
ttcacagtcacatcg

SEQ ID NO: 45635 - DNA, 15 bp, Homo sapiens
tcacagtcacatcga

SEQ ID NO: 45636 - DNA, 15 bp, Homo sapiens
cacagtcacatcgaa

SEQ ID NO: 45637 - DNA, 15 bp, Homo sapiens
acagtcacatcgaac

SEQ ID NO: 45638 - DNA, 15 bp, Homo sapiens
cagtcacatcgaacc

SEQ ID NO: 45639 - DNA, 15 bp, Homo sapiens
agtcacatcgaacct

SEQ ID NO: 45640 - DNA, 15 bp, Homo sapiens
gtcacatcgaacctt

SEQ ID NO: 45641 - DNA, 15 bp, Homo sapiens
tcacatcgaaccttg

SEQ ID NO: 45642 - DNA, 15 bp, Homo sapiens
cacatcgaaccttgc

SEQ ID NO: 45643 - DNA, 15 bp, Homo sapiens
acatcgaaccttgcc

SEQ ID NO: 45644 - DNA, 15 bp, Homo sapiens
catcgaaccttgccc

SEQ ID NO: 45645 - DNA, 15 bp, Homo sapiens
atcgaaccttgccct

SEQ ID NO: 45646 - DNA, 15 bp, Homo sapiens
tcgaaccttgccctc

SEQ ID NO: 45647 - DNA, 15 bp, Homo sapiens
cgaaccttgccctca

SEQ ID NO: 45648 - DNA, 15 bp, Homo sapiens
gaaccttgccctcat

SEQ ID NO: 45649 - DNA, 15 bp, Homo sapiens
aaccttgccctcatc

SEQ ID NO: 45650 - DNA, 15 bp, Homo sapiens
accttgccctcatcc

SEQ ID NO: 45651 - DNA, 15 bp, Homo sapiens
ccttgccctcatcct

SEQ ID NO: 45652 - DNA, 15 bp, Homo sapiens
cttgccctcatcctc

SEQ ID NO: 45653 - DNA, 15 bp, Homo sapiens
ttgccctcatcctct

SEQ ID NO: 45654 - DNA, 15 bp, Homo sapiens
tgccctcatcctctg

SEQ ID NO: 45655 - DNA, 15 bp, Homo sapiens
gccctcatcctctgc

SEQ ID NO: 45656 - DNA, 15 bp, Homo sapiens
ccctcatcctctgcc

SEQ ID NO: 45657 - DNA, 15 bp, Homo sapiens
cctcatcctctgcct

SEQ ID NO: 45658 - DNA, 15 bp, Homo sapiens
ctcatcctctgcctc

SEQ ID NO: 45659 - DNA, 15 bp, Homo sapiens
tcatcctctgcctcc

SEQ ID NO: 45660 - DNA, 15 bp, Homo sapiens
catcctctgcctcct

SEQ ID NO: 45661 - DNA, 15 bp, Homo sapiens
atcctctgcctcctt

SEQ ID NO: 45662 - DNA, 15 bp, Homo sapiens
tcctctgcctccttg

SEQ ID NO: 45663 - DNA, 15 bp, Homo sapiens
cctctgcctccttgt

SEQ ID NO: 45664 - DNA, 15 bp, Homo sapiens
ctctgcctccttgtc

SEQ ID NO: 45665 - DNA, 15 bp, Homo sapiens
tctgcctccttgtca

SEQ ID NO: 45666 - DNA, 15 bp, Homo sapiens
ctgcctccttgtcac

SEQ ID NO: 45667 - DNA, 15 bp, Homo sapiens
tgcctccttgtcaca

SEQ ID NO: 45668 - DNA, 15 bp, Homo sapiens
gcctccttgtcacag

SEQ ID NO: 45669 - DNA, 15 bp, Homo sapiens
cctccttgtcacaga

SEQ ID NO: 45670 - DNA, 15 bp, Homo sapiens
ctccttgtcacagag

SEQ ID NO: 45671 - DNA, 15 bp, Homo sapiens
tccttgtcacagagc

SEQ ID NO: 45672 - DNA, 15 bp, Homo sapiens
ccttgtcacagagca

SEQ ID NO: 45673 - DNA, 15 bp, Homo sapiens
cttgtcacagagcaa

SEQ ID NO: 45674 - DNA, 15 bp, Homo sapiens
ttgtcacagagcaac

SEQ ID NO: 45675 - DNA, 15 bp, Homo sapiens
tgtcacagagcaaca

SEQ ID NO: 45676 - DNA, 15 bp, Homo sapiens
gtcacagagcaacac

SEQ ID NO: 45677 - DNA, 15 bp, Homo sapiens
tcacagagcaacact

SEQ ID NO: 45678 - DNA, 15 bp, Homo sapiens
cacagagcaacactg

SEQ ID NO: 45679 - DNA, 15 bp, Homo sapiens
acagagcaacactgc

SEQ ID NO: 45680 - DNA, 15 bp, Homo sapiens
cagagcaacactgcc

SEQ ID NO: 45681 - DNA, 15 bp, Homo sapiens
agagcaacactgccc

SEQ ID NO: 45682 - DNA, 15 bp, Homo sapiens
gagcaacactgcccc

SEQ ID NO: 45683 - DNA, 15 bp, Homo sapiens
agcaacactgcccca

SEQ ID NO: 45684 - DNA, 15 bp, Homo sapiens
gcaacactgccccag

SEQ ID NO: 45685 - DNA, 15 bp, Homo sapiens
caacactgccccagt

SEQ ID NO: 45686 - DNA, 15 bp, Homo sapiens
aacactgccccagta

SEQ ID NO: 45687 - DNA, 15 bp, Homo sapiens
acactgccccagtag

SEQ ID NO: 45688 - DNA, 15 bp, Homo sapiens
cactgccccagtagc

SEQ ID NO: 45689 - DNA, 15 bp, Homo sapiens
actgccccagtagca

SEQ ID NO: 45690 - DNA, 15 bp, Homo sapiens
ctgccccagtagcac

SEQ ID NO: 45691 - DNA, 15 bp, Homo sapiens
tgccccagtagcaca

SEQ ID NO: 45692 - DNA, 15 bp, Homo sapiens
gccccagtagcacac

SEQ ID NO: 45693 - DNA, 15 bp, Homo sapiens
ccccagtagcacaca

SEQ ID NO: 45694 - DNA, 15 bp, Homo sapiens
cccagtagcacacat

SEQ ID NO: 45695 - DNA, 15 bp, Homo sapiens
ccagtagcacacatc

SEQ ID NO: 45696 - DNA, 15 bp, Homo sapiens
cagtagcacacatct

SEQ ID NO: 45697 - DNA, 15 bp, Homo sapiens
agtagcacacatctc

SEQ ID NO: 45698 - DNA, 15 bp, Homo sapiens
gtagcacacatctcc

SEQ ID NO: 45699 - DNA, 15 bp, Homo sapiens
tagcacacatctcca

SEQ ID NO: 45700 - DNA, 15 bp, Homo sapiens
agcacacatctccag

SEQ ID NO: 45701 - DNA, 15 bp, Homo sapiens
gcacacatctccagt

SEQ ID NO: 45702 - DNA, 15 bp, Homo sapiens
cacacatctccagtc

SEQ ID NO: 45703 - DNA, 15 bp, Homo sapiens
acacatctccagtct

SEQ ID NO: 45704 - DNA, 15 bp, Homo sapiens
cacatctccagtctg

SEQ ID NO: 45705 - DNA, 15 bp, Homo sapiens
acatctccagtctgt

SEQ ID NO: 45706 - DNA, 15 bp, Homo sapiens
catctccagtctgta

SEQ ID NO: 45707 - DNA, 15 bp, Homo sapiens
atctccagtctgtaa

SEQ ID NO: 45708 - DNA, 15 bp, Homo sapiens
tctccagtctgtaac

SEQ ID NO: 45709 - DNA, 15 bp, Homo sapiens
ctccagtctgtaaca

SEQ ID NO: 45710 - DNA, 15 bp, Homo sapiens
tccagtctgtaacaa

SEQ ID NO: 45711 - DNA, 15 bp, Homo sapiens
ccagtctgtaacaaa

SEQ ID NO: 45712 - DNA, 15 bp, Homo sapiens
cagtctgtaacaaag

SEQ ID NO: 45713 - DNA, 15 bp, Homo sapiens
agtctgtaacaaaga

SEQ ID NO: 45714 - DNA, 15 bp, Homo sapiens
gtctgtaacaaagaa

SEQ ID NO: 45715 - DNA, 15 bp, Homo sapiens
tctgtaacaaagaag

SEQ ID NO: 45716 - DNA, 15 bp, Homo sapiens
ctgtaacaaagaagt

SEQ ID NO: 45717 - DNA, 15 bp, Homo sapiens
tgtaacaaagaagtc

SEQ ID NO: 45718 - DNA, 15 bp, Homo sapiens
gtaacaaagaagtct

SEQ ID NO: 45719 - DNA, 15 bp, Homo sapiens
taacaaagaagtctt

SEQ ID NO: 45720 - DNA, 15 bp, Homo sapiens
aacaaagaagtctta

SEQ ID NO: 45721 - DNA, 15 bp, Homo sapiens
acaaagaagtcttag

SEQ ID NO: 45722 - DNA, 15 bp, Homo sapiens
caaagaagtcttagc

SEQ ID NO: 45723 - DNA, 15 bp, Homo sapiens
aaagaagtcttagca

SEQ ID NO: 45724 - DNA, 15 bp, Homo sapiens
aagaagtcttagcat

SEQ ID NO: 45725 - DNA, 15 bp, Homo sapiens
agaagtcttagcatc

SEQ ID NO: 45726 - DNA, 15 bp, Homo sapiens
gaagtcttagcatca

SEQ ID NO: 45727 - DNA, 15 bp, Homo sapiens
aagtcttagcatcaa

SEQ ID NO: 45728 - DNA, 15 bp, Homo sapiens
agtcttagcatcaag

SEQ ID NO: 45729 - DNA, 15 bp, Homo sapiens
gtcttagcatcaagc

SEQ ID NO: 45730 - DNA, 15 bp, Homo sapiens
tcttagcatcaagca

SEQ ID NO: 45731 - DNA, 15 bp, Homo sapiens
cttagcatcaagcat

SEQ ID NO: 45732 - DNA, 15 bp, Homo sapiens
ttagcatcaagcata

SEQ ID NO: 45733 - DNA, 15 bp, Homo sapiens
tagcatcaagcatac

SEQ ID NO: 45734 - DNA, 15 bp, Homo sapiens
agcatcaagcatact

SEQ ID NO: 45735 - DNA, 15 bp, Homo sapiens
gcatcaagcatactc

SEQ ID NO: 45736 - DNA, 15 bp, Homo sapiens
catcaagcatactca

SEQ ID NO: 45737 - DNA, 15 bp, Homo sapiens
atcaagcatactcaa

SEQ ID NO: 45738 - DNA, 15 bp, Homo sapiens
tcaagcatactcaag

SEQ ID NO: 45739 - DNA, 15 bp, Homo sapiens
caagcatactcaagc

SEQ ID NO: 45740 - DNA, 15 bp, Homo sapiens
aagcatactcaagcc

SEQ ID NO: 45741 - DNA, 15 bp, Homo sapiens
agcatactcaagcca

SEQ ID NO: 45742 - DNA, 15 bp, Homo sapiens
gcatactcaagccac

SEQ ID NO: 45743 - DNA, 15 bp, Homo sapiens
catactcaagccact

SEQ ID NO: 45744 - DNA, 15 bp, Homo sapiens
atactcaagccactt

SEQ ID NO: 45745 - DNA, 15 bp, Homo sapiens
tactcaagccacttg

SEQ ID NO: 45746 - DNA, 15 bp, Homo sapiens
actcaagccacttgg

SEQ ID NO: 45747 - DNA, 15 bp, Homo sapiens
ctcaagccacttgga

SEQ ID NO: 45748 - DNA, 15 bp, Homo sapiens
tcaagccacttggat

SEQ ID NO: 45749 - DNA, 15 bp, Homo sapiens
caagccacttggata

SEQ ID NO: 45750 - DNA, 15 bp, Homo sapiens
aagccacttggatag

SEQ ID NO: 45751 - DNA, 15 bp, Homo sapiens
agccacttggatagc

SEQ ID NO: 45752 - DNA, 15 bp, Homo sapiens
gccacttggatagca

SEQ ID NO: 45753 - DNA, 15 bp, Homo sapiens
ccacttggatagcaa

SEQ ID NO: 45754 - DNA, 15 bp, Homo sapiens
cacttggatagcaaa

SEQ ID NO: 45755 - DNA, 15 bp, Homo sapiens
acttggatagcaaat

SEQ ID NO: 45756 - DNA, 15 bp, Homo sapiens
cttggatagcaaatg

SEQ ID NO: 45757 - DNA, 15 bp, Homo sapiens
ttggatagcaaatga

SEQ ID NO: 45758 - DNA, 15 bp, Homo sapiens
tggatagcaaatgag

SEQ ID NO: 45759 - DNA, 15 bp, Homo sapiens
ggatagcaaatgagg

SEQ ID NO: 45760 - DNA, 15 bp, Homo sapiens
gatagcaaatgaggt

SEQ ID NO: 45761 - DNA, 15 bp, Homo sapiens
atagcaaatgaggtc

SEQ ID NO: 45762 - DNA, 15 bp, Homo sapiens
tagcaaatgaggtca

SEQ ID NO: 45763 - DNA, 15 bp, Homo sapiens
agcaaatgaggtcat

SEQ ID NO: 45764 - DNA, 15 bp, Homo sapiens
gcaaatgaggtcatc

SEQ ID NO: 45765 - DNA, 15 bp, Homo sapiens
caaatgaggtcatct

SEQ ID NO: 45766 - DNA, 15 bp, Homo sapiens
aaatgaggtcatctg

SEQ ID NO: 45767 - DNA, 15 bp, Homo sapiens
aatgaggtcatctga

SEQ ID NO: 45768 - DNA, 15 bp, Homo sapiens
atgaggtcatctgaa

SEQ ID NO: 45769 - DNA, 15 bp, Homo sapiens
tgaggtcatctgaaa

SEQ ID NO: 45770 - DNA, 15 bp, Homo sapiens
gaggtcatctgaaaa

SEQ ID NO: 45771 - DNA, 15 bp, Homo sapiens
aggtcatctgaaaat

SEQ ID NO: 45772 - DNA, 15 bp, Homo sapiens
ggtcatctgaaaata

SEQ ID NO: 45773 - DNA, 15 bp, Homo sapiens
gtcatctgaaaatac

SEQ ID NO: 45774 - DNA, 15 bp, Homo sapiens
tcatctgaaaatact

SEQ ID NO: 45775 - DNA, 15 bp, Homo sapiens
catctgaaaatactt

SEQ ID NO: 45776 - DNA, 15 bp, Homo sapiens
atctgaaaatacttt

SEQ ID NO: 45777 - DNA, 15 bp, Homo sapiens
tctgaaaatactttt

SEQ ID NO: 45778 - DNA, 15 bp, Homo sapiens
ctgaaaatactttta

SEQ ID NO: 45779 - DNA, 15 bp, Homo sapiens
tgaaaatacttttaa

SEQ ID NO: 45780 - DNA, 15 bp, Homo sapiens
gaaaatacttttaaa

SEQ ID NO: 45781 - DNA, 15 bp, Homo sapiens
aaaatacttttaaag

SEQ ID NO: 45782 - DNA, 15 bp, Homo sapiens
aaatacttttaaagt

SEQ ID NO: 45783 - DNA, 15 bp, Homo sapiens
aatacttttaaagtt

SEQ ID NO: 45784 - DNA, 15 bp, Homo sapiens
atacttttaaagttt

SEQ ID NO: 45785 - DNA, 15 bp, Homo sapiens
tacttttaaagttta

SEQ ID NO: 45786 - DNA, 15 bp, Homo sapiens
acttttaaagtttac

SEQ ID NO: 45787 - DNA, 15 bp, Homo sapiens
cttttaaagtttact

SEQ ID NO: 45788 - DNA, 15 bp, Homo sapiens
ttttaaagtttactt

SEQ ID NO: 45789 - DNA, 15 bp, Homo sapiens
tttaaagtttacttt

SEQ ID NO: 45790 - DNA, 15 bp, Homo sapiens
ttaaagtttactttt

SEQ ID NO: 45791 - DNA, 15 bp, Homo sapiens
taaagtttacttttt

SEQ ID NO: 45792 - DNA, 15 bp, Homo sapiens
aaagtttactttttt

SEQ ID NO: 45793 - DNA, 15 bp, Homo sapiens
aagtttactttttta

SEQ ID NO: 45794 - DNA, 15 bp, Homo sapiens
agtttacttttttaa

SEQ ID NO: 45795 - DNA, 15 bp, Homo sapiens
gtttacttttttaaa

SEQ ID NO: 45796 - DNA, 15 bp, Homo sapiens
tttacttttttaaaa

SEQ ID NO: 45797 - DNA, 15 bp, Homo sapiens
ttacttttttaaaaa

SEQ ID NO: 45798 - DNA, 15 bp, Homo sapiens
tacttttttaaaaaa

SEQ ID NO: 45799 - DNA, 15 bp, Homo sapiens
acttttttaaaaaac

SEQ ID NO: 45800 - DNA, 15 bp, Homo sapiens
cttttttaaaaaaca

SEQ ID NO: 45801 - DNA, 15 bp, Homo sapiens
ttttttaaaaaacag

SEQ ID NO: 45802 - DNA, 15 bp, Homo sapiens
tttttaaaaaacagt

SEQ ID NO: 45803 - DNA, 15 bp, Homo sapiens
ttttaaaaaacagtt

SEQ ID NO: 45804 - DNA, 15 bp, Homo sapiens
tttaaaaaacagttt

SEQ ID NO: 45805 - DNA, 15 bp, Homo sapiens
ttaaaaaacagtttt

SEQ ID NO: 45806 - DNA, 15 bp, Homo sapiens
taaaaaacagttttt

SEQ ID NO: 45807 - DNA, 15 bp, Homo sapiens
aaaaaacagtttttt

SEQ ID NO: 45808 - DNA, 15 bp, Homo sapiens
aaaaacagttttttg

SEQ ID NO: 45809 - DNA, 15 bp, Homo sapiens
aaaacagttttttgt

SEQ ID NO: 45810 - DNA, 15 bp, Homo sapiens
aaacagttttttgtt

SEQ ID NO: 45811 - DNA, 15 bp, Homo sapiens
aacagttttttgttt

SEQ ID NO: 45812 - DNA, 15 bp, Homo sapiens
acagttttttgttta

SEQ ID NO: 45813 - DNA, 15 bp, Homo sapiens
cagttttttgtttac

SEQ ID NO: 45814 - DNA, 15 bp, Homo sapiens
agttttttgtttaca

SEQ ID NO: 45815 - DNA, 15 bp, Homo sapiens
gttttttgtttacag

SEQ ID NO: 45816 - DNA, 15 bp, Homo sapiens
ttttttgtttacagg

SEQ ID NO: 45817 - DNA, 15 bp, Homo sapiens
tttttgtttacagga

SEQ ID NO: 45818 - DNA, 15 bp, Homo sapiens
ttttgtttacaggac

SEQ ID NO: 45819 - DNA, 15 bp, Homo sapiens
tttgtttacaggacc

SEQ ID NO: 45820 - DNA, 15 bp, Homo sapiens
ttgtttacaggaccc

SEQ ID NO: 45821 - DNA, 15 bp, Homo sapiens
tgtttacaggaccca

SEQ ID NO: 45822 - DNA, 15 bp, Homo sapiens
gtttacaggacccaa

SEQ ID NO: 45823 - DNA, 15 bp, Homo sapiens
tttacaggacccaaa

SEQ ID NO: 45824 - DNA, 15 bp, Homo sapiens
ttacaggacccaaat

SEQ ID NO: 45825 - DNA, 15 bp, Homo sapiens
tacaggacccaaatg

SEQ ID NO: 45826 - DNA, 15 bp, Homo sapiens
acaggacccaaatgg

SEQ ID NO: 45827 - DNA, 15 bp, Homo sapiens
caggacccaaatggc

SEQ ID NO: 45828 - DNA, 15 bp, Homo sapiens
aggacccaaatggca

SEQ ID NO: 45829 - DNA, 15 bp, Homo sapiens
ggacccaaatggcag

SEQ ID NO: 45830 - DNA, 15 bp, Homo sapiens
gacccaaatggcagt

SEQ ID NO: 45831 - DNA, 15 bp, Homo sapiens
acccaaatggcagtt

SEQ ID NO: 45832 - DNA, 15 bp, Homo sapiens
cccaaatggcagttg

SEQ ID NO: 45833 - DNA, 15 bp, Homo sapiens
ccaaatggcagttga

SEQ ID NO: 45834 - DNA, 15 bp, Homo sapiens
caaatggcagttgac

SEQ ID NO: 45835 - DNA, 15 bp, Homo sapiens
aaatggcagttgaca

SEQ ID NO: 45836 - DNA, 15 bp, Homo sapiens
aatggcagttgacat

SEQ ID NO: 45837 - DNA, 15 bp, Homo sapiens
atggcagttgacatt

SEQ ID NO: 45838 - DNA, 15 bp, Homo sapiens
tggcagttgacattc

SEQ ID NO: 45839 - DNA, 15 bp, Homo sapiens
ggcagttgacattcc

SEQ ID NO: 45840 - DNA, 15 bp, Homo sapiens
gcagttgacattccc

SEQ ID NO: 45841 - DNA, 15 bp, Homo sapiens
cagttgacattccct

SEQ ID NO: 45842 - DNA, 15 bp, Homo sapiens
agttgacattccctg

SEQ ID NO: 45843 - DNA, 15 bp, Homo sapiens
gttgacattccctgt

SEQ ID NO: 45844 - DNA, 15 bp, Homo sapiens
ttgacattccctgta

SEQ ID NO: 45845 - DNA, 15 bp, Homo sapiens
tgacattccctgtaa

SEQ ID NO: 45846 - DNA, 15 bp, Homo sapiens
gacattccctgtaaa

SEQ ID NO: 45847 - DNA, 15 bp, Homo sapiens
acattccctgtaaaa

SEQ ID NO: 45848 - DNA, 15 bp, Homo sapiens
cattccctgtaaaag

SEQ ID NO: 45849 - DNA, 15 bp, Homo sapiens
attccctgtaaaagt

SEQ ID NO: 45850 - DNA, 15 bp, Homo sapiens
ttccctgtaaaagtt

SEQ ID NO: 45851 - DNA, 15 bp, Homo sapiens
tccctgtaaaagttt

SEQ ID NO: 45852 - DNA, 15 bp, Homo sapiens
ccctgtaaaagttta

SEQ ID NO: 45853 - DNA, 15 bp, Homo sapiens
cctgtaaaagtttaa

SEQ ID NO: 45854 - DNA, 15 bp, Homo sapiens
ctgtaaaagtttaac

SEQ ID NO: 45855 - DNA, 15 bp, Homo sapiens
tgtaaaagtttaacc

SEQ ID NO: 45856 - DNA, 15 bp, Homo sapiens
gtaaaagtttaacct

SEQ ID NO: 45857 - DNA, 15 bp, Homo sapiens
taaaagtttaacctc

SEQ ID NO: 45858 - DNA, 15 bp, Homo sapiens
aaaagtttaacctct

SEQ ID NO: 45859 - DNA, 15 bp, Homo sapiens
aaagtttaacctctt

SEQ ID NO: 45860 - DNA, 15 bp, Homo sapiens
aagtttaacctcttc

SEQ ID NO: 45861 - DNA, 15 bp, Homo sapiens
agtttaacctcttca

SEQ ID NO: 45862 - DNA, 15 bp, Homo sapiens
gtttaacctcttcaa

SEQ ID NO: 45863 - DNA, 15 bp, Homo sapiens
tttaacctcttcaat

SEQ ID NO: 45864 - DNA, 15 bp, Homo sapiens
ttaacctcttcaatt

SEQ ID NO: 45865 - DNA, 15 bp, Homo sapiens
taacctcttcaatta

SEQ ID NO: 45866 - DNA, 15 bp, Homo sapiens
aacctcttcaattag

SEQ ID NO: 45867 - DNA, 15 bp, Homo sapiens
acctcttcaattaga

SEQ ID NO: 45868 - DNA, 15 bp, Homo sapiens
cctcttcaattagaa

SEQ ID NO: 45869 - DNA, 15 bp, Homo sapiens
ctcttcaattagaat

SEQ ID NO: 45870 - DNA, 15 bp, Homo sapiens
tcttcaattagaatt

SEQ ID NO: 45871 - DNA, 15 bp, Homo sapiens
cttcaattagaattc

SEQ ID NO: 45872 - DNA, 15 bp, Homo sapiens
ttcaattagaattct

SEQ ID NO: 45873 - DNA, 15 bp, Homo sapiens
tcaattagaattctg

SEQ ID NO: 45874 - DNA, 15 bp, Homo sapiens
caattagaattctgt

SEQ ID NO: 45875 - DNA, 15 bp, Homo sapiens
aattagaattctgtt

SEQ ID NO: 45876 - DNA, 15 bp, Homo sapiens
attagaattctgttt

SEQ ID NO: 45877 - DNA, 15 bp, Homo sapiens
ttagaattctgtttt

SEQ ID NO: 45878 - DNA, 15 bp, Homo sapiens
tagaattctgttttc

SEQ ID NO: 45879 - DNA, 15 bp, Homo sapiens
agaattctgttttct

SEQ ID NO: 45880 - DNA, 15 bp, Homo sapiens
gaattctgttttctt

SEQ ID NO: 45881 - DNA, 15 bp, Homo sapiens
aattctgttttcttt

SEQ ID NO: 45882 - DNA, 15 bp, Homo sapiens
attctgttttcttta

SEQ ID NO: 45883 - DNA, 15 bp, Homo sapiens
ttctgttttctttag

SEQ ID NO: 45884 - DNA, 15 bp, Homo sapiens
tctgttttctttaga

SEQ ID NO: 45885 - DNA, 15 bp, Homo sapiens
ctgttttctttagaa

SEQ ID NO: 45886 - DNA, 15 bp, Homo sapiens
tgttttctttagaat

SEQ ID NO: 45887 - DNA, 15 bp, Homo sapiens
gttttctttagaatt

SEQ ID NO: 45888 - DNA, 15 bp, Homo sapiens
ttttctttagaattt

SEQ ID NO: 45889 - DNA, 15 bp, Homo sapiens
tttctttagaatttc

SEQ ID NO: 45890 - DNA, 15 bp, Homo sapiens
ttctttagaatttca

SEQ ID NO: 45891 - DNA, 15 bp, Homo sapiens
tctttagaatttcag

SEQ ID NO: 45892 - DNA, 15 bp, Homo sapiens
ctttagaatttcagg

SEQ ID NO: 45893 - DNA, 15 bp, Homo sapiens
tttagaatttcaggt

SEQ ID NO: 45894 - DNA, 15 bp, Homo sapiens
ttagaatttcaggtg

SEQ ID NO: 45895 - DNA, 15 bp, Homo sapiens
tagaatttcaggtgg

SEQ ID NO: 45896 - DNA, 15 bp, Homo sapiens
agaatttcaggtggg

SEQ ID NO: 45897 - DNA, 15 bp, Homo sapiens
gaatttcaggtggga

SEQ ID NO: 45898 - DNA, 15 bp, Homo sapiens
aatttcaggtgggat

SEQ ID NO: 45899 - DNA, 15 bp, Homo sapiens
atttcaggtgggatc

SEQ ID NO: 45900 - DNA, 15 bp, Homo sapiens
tttcaggtgggatct

SEQ ID NO: 45901 - DNA, 15 bp, Homo sapiens
ttcaggtgggatctg

SEQ ID NO: 45902 - DNA, 15 bp, Homo sapiens
tcaggtgggatctgt

SEQ ID NO: 45903 - DNA, 15 bp, Homo sapiens
caggtgggatctgtt

SEQ ID NO: 45904 - DNA, 15 bp, Homo sapiens
aggtgggatctgtta

SEQ ID NO: 45905 - DNA, 15 bp, Homo sapiens
ggtgggatctgttac

SEQ ID NO: 45906 - DNA, 15 bp, Homo sapiens
gtgggatctgttaca

SEQ ID NO: 45907 - DNA, 15 bp, Homo sapiens
tgggatctgttacaa

SEQ ID NO: 45908 - DNA, 15 bp, Homo sapiens
gggatctgttacaat

SEQ ID NO: 45909 - DNA, 15 bp, Homo sapiens
ggatctgttacaatt

SEQ ID NO: 45910 - DNA, 15 bp, Homo sapiens
gatctgttacaattc

SEQ ID NO: 45911 - DNA, 15 bp, Homo sapiens
atctgttacaattca

SEQ ID NO: 45912 - DNA, 15 bp, Homo sapiens
tctgttacaattcac

SEQ ID NO: 45913 - DNA, 15 bp, Homo sapiens
ctgttacaattcact

SEQ ID NO: 45914 - DNA, 15 bp, Homo sapiens
tgttacaattcactg

SEQ ID NO: 45915 - DNA, 15 bp, Homo sapiens
gttacaattcactga

SEQ ID NO: 45916 - DNA, 15 bp, Homo sapiens
ttacaattcactgaa

SEQ ID NO: 45917 - DNA, 15 bp, Homo sapiens
tacaattcactgaag

SEQ ID NO: 45918 - DNA, 15 bp, Homo sapiens
acaattcactgaagt

SEQ ID NO: 45919 - DNA, 15 bp, Homo sapiens
caattcactgaagtt

SEQ ID NO: 45920 - DNA, 15 bp, Homo sapiens
aattcactgaagttt

SEQ ID NO: 45921 - DNA, 15 bp, Homo sapiens
attcactgaagttta

SEQ ID NO: 45922 - DNA, 15 bp, Homo sapiens
ttcactgaagtttag

SEQ ID NO: 45923 - DNA, 15 bp, Homo sapiens
tcactgaagtttaga

SEQ ID NO: 45924 - DNA, 15 bp, Homo sapiens
cactgaagtttagat

SEQ ID NO: 45925 - DNA, 15 bp, Homo sapiens
actgaagtttagatt

SEQ ID NO: 45926 - DNA, 15 bp, Homo sapiens
ctgaagtttagattt

SEQ ID NO: 45927 - DNA, 15 bp, Homo sapiens
tgaagtttagatttg

SEQ ID NO: 45928 - DNA, 15 bp, Homo sapiens
gaagtttagatttga

SEQ ID NO: 45929 - DNA, 15 bp, Homo sapiens
aagtttagatttgac

SEQ ID NO: 45930 - DNA, 15 bp, Homo sapiens
agtttagatttgaca

SEQ ID NO: 45931 - DNA, 15 bp, Homo sapiens
gtttagatttgacaa

SEQ ID NO: 45932 - DNA, 15 bp, Homo sapiens
tttagatttgacaat

SEQ ID NO: 45933 - DNA, 15 bp, Homo sapiens
ttagatttgacaatg

SEQ ID NO: 45934 - DNA, 15 bp, Homo sapiens
tagatttgacaatgt

SEQ ID NO: 45935 - DNA, 15 bp, Homo sapiens
agatttgacaatgtt

SEQ ID NO: 45936 - DNA, 15 bp, Homo sapiens
gatttgacaatgttc

SEQ ID NO: 45937 - DNA, 15 bp, Homo sapiens
atttgacaatgttct

SEQ ID NO: 45938 - DNA, 15 bp, Homo sapiens
tttgacaatgttcta

SEQ ID NO: 45939 - DNA, 15 bp, Homo sapiens
ttgacaatgttctat

SEQ ID NO: 45940 - DNA, 15 bp, Homo sapiens
tgacaatgttctatc

SEQ ID NO: 45941 - DNA, 15 bp, Homo sapiens
gacaatgttctatct

SEQ ID NO: 45942 - DNA, 15 bp, Homo sapiens
acaatgttctatcta

SEQ ID NO: 45943 - DNA, 15 bp, Homo sapiens
caatgttctatctac

SEQ ID NO: 45944 - DNA, 15 bp, Homo sapiens
aatgttctatctact

SEQ ID NO: 45945 - DNA, 15 bp, Homo sapiens
atgttctatctacta

SEQ ID NO: 45946 - DNA, 15 bp, Homo sapiens
tgttctatctactat

SEQ ID NO: 45947 - DNA, 15 bp, Homo sapiens
gttctatctactatg

SEQ ID NO: 45948 - DNA, 15 bp, Homo sapiens
ttctatctactatgt

SEQ ID NO: 45949 - DNA, 15 bp, Homo sapiens
tctatctactatgtt

SEQ ID NO: 45950 - DNA, 15 bp, Homo sapiens
ctatctactatgtta

SEQ ID NO: 45951 - DNA, 15 bp, Homo sapiens
tatctactatgttat

SEQ ID NO: 45952 - DNA, 15 bp, Homo sapiens
atctactatgttatt

SEQ ID NO: 45953 - DNA, 15 bp, Homo sapiens
tctactatgttattg

SEQ ID NO: 45954 - DNA, 15 bp, Homo sapiens
ctactatgttattga

SEQ ID NO: 45955 - DNA, 15 bp, Homo sapiens
tactatgttattgaa

SEQ ID NO: 45956 - DNA, 15 bp, Homo sapiens
actatgttattgaaa

SEQ ID NO: 45957 - DNA, 15 bp, Homo sapiens
ctatgttattgaaac

SEQ ID NO: 45958 - DNA, 15 bp, Homo sapiens
tatgttattgaaacc

SEQ ID NO: 45959 - DNA, 15 bp, Homo sapiens
atgttattgaaacca

SEQ ID NO: 45960 - DNA, 15 bp, Homo sapiens
tgttattgaaaccat

SEQ ID NO: 45961 - DNA, 15 bp, Homo sapiens
gttattgaaaccata

SEQ ID NO: 45962 - DNA, 15 bp, Homo sapiens
ttattgaaaccatat

SEQ ID NO: 45963 - DNA, 15 bp, Homo sapiens
tattgaaaccatata

SEQ ID NO: 45964 - DNA, 15 bp, Homo sapiens
attgaaaccatataa

SEQ ID NO: 45965 - DNA, 15 bp, Homo sapiens
ttgaaaccatataat

SEQ ID NO: 45966 - DNA, 15 bp, Homo sapiens
tgaaaccatataata

SEQ ID NO: 45967 - DNA, 15 bp, Homo sapiens
gaaaccatataatat

SEQ ID NO: 45968 - DNA, 15 bp, Homo sapiens
aaaccatataatatt

SEQ ID NO: 45969 - DNA, 15 bp, Homo sapiens
aaccatataatattt

SEQ ID NO: 45970 - DNA, 15 bp, Homo sapiens
accatataatattta

SEQ ID NO: 45971 - DNA, 15 bp, Homo sapiens
ccatataatatttac

SEQ ID NO: 45972 - DNA, 15 bp, Homo sapiens
catataatatttacc

SEQ ID NO: 45973 - DNA, 15 bp, Homo sapiens
atataatatttacca

SEQ ID NO: 45974 - DNA, 15 bp, Homo sapiens
tataatatttaccaa

SEQ ID NO: 45975 - DNA, 15 bp, Homo sapiens
ataatatttaccaaa

SEQ ID NO: 45976 - DNA, 15 bp, Homo sapiens
taatatttaccaaat

SEQ ID NO: 45977 - DNA, 15 bp, Homo sapiens
aatatttaccaaatt

SEQ ID NO: 45978 - DNA, 15 bp, Homo sapiens
atatttaccaaattc

SEQ ID NO: 45979 - DNA, 15 bp, Homo sapiens
tatttaccaaattcc

SEQ ID NO: 45980 - DNA, 15 bp, Homo sapiens
atttaccaaattccc

SEQ ID NO: 45981 - DNA, 15 bp, Homo sapiens
tttaccaaattccca

SEQ ID NO: 45982 - DNA, 15 bp, Homo sapiens
ttaccaaattcccat

SEQ ID NO: 45983 - DNA, 15 bp, Homo sapiens
taccaaattcccata

SEQ ID NO: 45984 - DNA, 15 bp, Homo sapiens
accaaattcccatac

SEQ ID NO: 45985 - DNA, 15 bp, Homo sapiens
ccaaattcccataca

SEQ ID NO: 45986 - DNA, 15 bp, Homo sapiens
caaattcccatacat

SEQ ID NO: 45987 - DNA, 15 bp, Homo sapiens
aaattcccatacatg

SEQ ID NO: 45988 - DNA, 15 bp, Homo sapiens
aattcccatacatgg

SEQ ID NO: 45989 - DNA, 15 bp, Homo sapiens
attcccatacatggt

SEQ ID NO: 45990 - DNA, 15 bp, Homo sapiens
ttcccatacatggta

SEQ ID NO: 45991 - DNA, 15 bp, Homo sapiens
tcccatacatggtag

SEQ ID NO: 45992 - DNA, 15 bp, Homo sapiens
cccatacatggtaga

SEQ ID NO: 45993 - DNA, 15 bp, Homo sapiens
ccatacatggtagac

SEQ ID NO: 45994 - DNA, 15 bp, Homo sapiens
catacatggtagaca

SEQ ID NO: 45995 - DNA, 15 bp, Homo sapiens
atacatggtagacag

SEQ ID NO: 45996 - DNA, 15 bp, Homo sapiens
tacatggtagacagt

SEQ ID NO: 45997 - DNA, 15 bp, Homo sapiens
acatggtagacagtg

SEQ ID NO: 45998 - DNA, 15 bp, Homo sapiens
catggtagacagtga

SEQ ID NO: 45999 - DNA, 15 bp, Homo sapiens
atggtagacagtgac

SEQ ID NO: 46000 - DNA, 15 bp, Homo sapiens
tggtagacagtgaca

SEQ ID NO: 46001 - DNA, 15 bp, Homo sapiens
ggtagacagtgacat

SEQ ID NO: 46002 - DNA, 15 bp, Homo sapiens
gtagacagtgacatt

SEQ ID NO: 46003 - DNA, 15 bp, Homo sapiens
tagacagtgacatta

SEQ ID NO: 46004 - DNA, 15 bp, Homo sapiens
agacagtgacattaa

SEQ ID NO: 46005 - DNA, 15 bp, Homo sapiens
gacagtgacattaat

SEQ ID NO: 46006 - DNA, 15 bp, Homo sapiens
acagtgacattaatt

SEQ ID NO: 46007 - DNA, 15 bp, Homo sapiens
cagtgacattaatta

SEQ ID NO: 46008 - DNA, 15 bp, Homo sapiens
agtgacattaattaa

SEQ ID NO: 46009 - DNA, 15 bp, Homo sapiens
gtgacattaattaag

SEQ ID NO: 46010 - DNA, 15 bp, Homo sapiens
tgacattaattaaga

SEQ ID NO: 46011 - DNA, 15 bp, Homo sapiens
gacattaattaagaa

SEQ ID NO: 46012 - DNA, 15 bp, Homo sapiens
acattaattaagaag

SEQ ID NO: 46013 - DNA, 15 bp, Homo sapiens
cattaattaagaaga

SEQ ID NO: 46014 - DNA, 15 bp, Homo sapiens
attaattaagaagat

SEQ ID NO: 46015 - DNA, 15 bp, Homo sapiens
ttaattaagaagata

SEQ ID NO: 46016 - DNA, 15 bp, Homo sapiens
taattaagaagataa

SEQ ID NO: 46017 - DNA, 15 bp, Homo sapiens
aattaagaagataat

SEQ ID NO: 46018 - DNA, 15 bp, Homo sapiens
attaagaagataatt

SEQ ID NO: 46019 - DNA, 15 bp, Homo sapiens
ttaagaagataattt

SEQ ID NO: 46020 - DNA, 15 bp, Homo sapiens
taagaagataatttc

SEQ ID NO: 46021 - DNA, 15 bp, Homo sapiens
aagaagataatttcc

SEQ ID NO: 46022 - DNA, 15 bp, Homo sapiens
agaagataatttcca

SEQ ID NO: 46023 - DNA, 15 bp, Homo sapiens
gaagataatttccaa

SEQ ID NO: 46024 - DNA, 15 bp, Homo sapiens
aagataatttccaat

SEQ ID NO: 46025 - DNA, 15 bp, Homo sapiens
agataatttccaatt

SEQ ID NO: 46026 - DNA, 15 bp, Homo sapiens
gataatttccaattt

SEQ ID NO: 46027 - DNA, 15 bp, Homo sapiens
ataatttccaatttg

SEQ ID NO: 46028 - DNA, 15 bp, Homo sapiens
taatttccaatttgt

SEQ ID NO: 46029 - DNA, 15 bp, Homo sapiens
aatttccaatttgtt

SEQ ID NO: 46030 - DNA, 15 bp, Homo sapiens
atttccaatttgttc

SEQ ID NO: 46031 - DNA, 15 bp, Homo sapiens
tttccaatttgttcc

SEQ ID NO: 46032 - DNA, 15 bp, Homo sapiens
ttccaatttgttcca

SEQ ID NO: 46033 - DNA, 15 bp, Homo sapiens
tccaatttgttccat

SEQ ID NO: 46034 - DNA, 15 bp, Homo sapiens
ccaatttgttccatg

SEQ ID NO: 46035 - DNA, 15 bp, Homo sapiens
caatttgttccatga

SEQ ID NO: 46036 - DNA, 15 bp, Homo sapiens
aatttgttccatgaa

SEQ ID NO: 46037 - DNA, 15 bp, Homo sapiens
atttgttccatgaag

SEQ ID NO: 46038 - DNA, 15 bp, Homo sapiens
tttgttccatgaagt

SEQ ID NO: 46039 - DNA, 15 bp, Homo sapiens
ttgttccatgaagtt

SEQ ID NO: 46040 - DNA, 15 bp, Homo sapiens
tgttccatgaagttt

SEQ ID NO: 46041 - DNA, 15 bp, Homo sapiens
gttccatgaagtttc

SEQ ID NO: 46042 - DNA, 15 bp, Homo sapiens
ttccatgaagtttca

SEQ ID NO: 46043 - DNA, 15 bp, Homo sapiens
tccatgaagtttcag

SEQ ID NO: 46044 - DNA, 15 bp, Homo sapiens
ccatgaagtttcagt

SEQ ID NO: 46045 - DNA, 15 bp, Homo sapiens
catgaagtttcagtg

SEQ ID NO: 46046 - DNA, 15 bp, Homo sapiens
atgaagtttcagtga

SEQ ID NO: 46047 - DNA, 15 bp, Homo sapiens
tgaagtttcagtgac

SEQ ID NO: 46048 - DNA, 15 bp, Homo sapiens
gaagtttcagtgacc

SEQ ID NO: 46049 - DNA, 15 bp, Homo sapiens
aagtttcagtgaccc

SEQ ID NO: 46050 - DNA, 15 bp, Homo sapiens
agtttcagtgaccca

SEQ ID NO: 46051 - DNA, 15 bp, Homo sapiens
gtttcagtgacccac

SEQ ID NO: 46052 - DNA, 15 bp, Homo sapiens
tttcagtgacccact

SEQ ID NO: 46053 - DNA, 15 bp, Homo sapiens
ttcagtgacccactc

SEQ ID NO: 46054 - DNA, 15 bp, Homo sapiens
tcagtgacccactct

SEQ ID NO: 46055 - DNA, 15 bp, Homo sapiens
cagtgacccactctg

SEQ ID NO: 46056 - DNA, 15 bp, Homo sapiens
agtgacccactctgt

SEQ ID NO: 46057 - DNA, 15 bp, Homo sapiens
gtgacccactctgta

SEQ ID NO: 46058 - DNA, 15 bp, Homo sapiens
tgacccactctgtaa

SEQ ID NO: 46059 - DNA, 15 bp, Homo sapiens
gacccactctgtaat

SEQ ID NO: 46060 - DNA, 15 bp, Homo sapiens
acccactctgtaata

SEQ ID NO: 46061 - DNA, 15 bp, Homo sapiens
cccactctgtaataa

SEQ ID NO: 46062 - DNA, 15 bp, Homo sapiens
ccactctgtaataaa

SEQ ID NO: 46063 - DNA, 15 bp, Homo sapiens
cactctgtaataaag

SEQ ID NO: 46064 - DNA, 15 bp, Homo sapiens
actctgtaataaaga

SEQ ID NO: 46065 - DNA, 15 bp, Homo sapiens
ctctgtaataaagaa

SEQ ID NO: 46066 - DNA, 15 bp, Homo sapiens
tctgtaataaagaac

SEQ ID NO: 46067 - DNA, 15 bp, Homo sapiens
ctgtaataaagaact

SEQ ID NO: 46068 - DNA, 15 bp, Homo sapiens
tgtaataaagaactt

SEQ ID NO: 46069 - DNA, 15 bp, Homo sapiens
gtaataaagaacttg

SEQ ID NO: 46070 - DNA, 15 bp, Homo sapiens
taataaagaacttgg

SEQ ID NO: 46071 - DNA, 15 bp, Homo sapiens
aataaagaacttgga

SEQ ID NO: 46072 - DNA, 15 bp, Homo sapiens
ataaagaacttggaa

SEQ ID NO: 46073 - DNA, 15 bp, Homo sapiens
taaagaacttggaaa

SEQ ID NO: 46074 - DNA, 15 bp, Homo sapiens
aaagaacttggaaag

SEQ ID NO: 46075 - DNA, 15 bp, Homo sapiens
aagaacttggaaagg

SEQ ID NO: 46076 - DNA, 15 bp, Homo sapiens
agaacttggaaaggg

SEQ ID NO: 46077 - DNA, 15 bp, Homo sapiens
gaacttggaaaggga

SEQ ID NO: 46078 - DNA, 15 bp, Homo sapiens
aacttggaaagggag

SEQ ID NO: 46079 - DNA, 15 bp, Homo sapiens
acttggaaagggagg

SEQ ID NO: 46080 - DNA, 15 bp, Homo sapiens
cttggaaagggaggt

SEQ ID NO: 46081 - DNA, 15 bp, Homo sapiens
ttggaaagggaggtt

SEQ ID NO: 46082 - DNA, 15 bp, Homo sapiens
tggaaagggaggttc

SEQ ID NO: 46083 - DNA, 15 bp, Homo sapiens
ggaaagggaggttcc

SEQ ID NO: 46084 - DNA, 15 bp, Homo sapiens
gaaagggaggttcca

SEQ ID NO: 46085 - DNA, 15 bp, Homo sapiens
aaagggaggttccaa

SEQ ID NO: 46086 - DNA, 15 bp, Homo sapiens
aagggaggttccaag

SEQ ID NO: 46087 - DNA, 15 bp, Homo sapiens
agggaggttccaaga

SEQ ID NO: 46088 - DNA, 15 bp, Homo sapiens
gggaggttccaagat

SEQ ID NO: 46089 - DNA, 15 bp, Homo sapiens
ggaggttccaagatg

SEQ ID NO: 46090 - DNA, 15 bp, Homo sapiens
gaggttccaagatgg

SEQ ID NO: 46091 - DNA, 15 bp, Homo sapiens
aggttccaagatggc

SEQ ID NO: 46092 - DNA, 15 bp, Homo sapiens
ggttccaagatggcc

SEQ ID NO: 46093 - DNA, 15 bp, Homo sapiens
gttccaagatggcca

SEQ ID NO: 46094 - DNA, 15 bp, Homo sapiens
ttccaagatggccaa

SEQ ID NO: 46095 - DNA, 15 bp, Homo sapiens
tccaagatggccaaa

SEQ ID NO: 46096 - DNA, 15 bp, Homo sapiens
ccaagatggccaaat

SEQ ID NO: 46097 - DNA, 15 bp, Homo sapiens
caagatggccaaata

SEQ ID NO: 46098 - DNA, 15 bp, Homo sapiens
aagatggccaaatat

SEQ ID NO: 46099 - DNA, 15 bp, Homo sapiens
agatggccaaatatg

SEQ ID NO: 46100 - DNA, 15 bp, Homo sapiens
gatggccaaatatga

SEQ ID NO: 46101 - DNA, 15 bp, Homo sapiens
atggccaaatatgaa

SEQ ID NO: 46102 - DNA, 15 bp, Homo sapiens
tggccaaatatgaac

SEQ ID NO: 46103 - DNA, 15 bp, Homo sapiens
ggccaaatatgaaca

SEQ ID NO: 46104 - DNA, 15 bp, Homo sapiens
gccaaatatgaacag

SEQ ID NO: 46105 - DNA, 15 bp, Homo sapiens
ccaaatatgaacagc

SEQ ID NO: 46106 - DNA, 15 bp, Homo sapiens
caaatatgaacagct

SEQ ID NO: 46107 - DNA, 15 bp, Homo sapiens
aaatatgaacagctc

SEQ ID NO: 46108 - DNA, 15 bp, Homo sapiens
aatatgaacagctcc

SEQ ID NO: 46109 - DNA, 15 bp, Homo sapiens
atatgaacagctcca

SEQ ID NO: 46110 - DNA, 15 bp, Homo sapiens
tatgaacagctccag

SEQ ID NO: 46111 - DNA, 15 bp, Homo sapiens
atgaacagctccagt

SEQ ID NO: 46112 - DNA, 15 bp, Homo sapiens
tgaacagctccagtc

SEQ ID NO: 46113 - DNA, 15 bp, Homo sapiens
gaacagctccagtct

SEQ ID NO: 46114 - DNA, 15 bp, Homo sapiens
aacagctccagtcta

SEQ ID NO: 46115 - DNA, 15 bp, Homo sapiens
acagctccagtctac

SEQ ID NO: 46116 - DNA, 15 bp, Homo sapiens
cagctccagtctaca

SEQ ID NO: 46117 - DNA, 15 bp, Homo sapiens
agctccagtctacag

SEQ ID NO: 46118 - DNA, 15 bp, Homo sapiens
gctccagtctacagc

SEQ ID NO: 46119 - DNA, 15 bp, Homo sapiens
ctccagtctacagcc

SEQ ID NO: 46120 - DNA, 15 bp, Homo sapiens
tccagtctacagccc

SEQ ID NO: 46121 - DNA, 15 bp, Homo sapiens
ccagtctacagcccc

SEQ ID NO: 46122 - DNA, 15 bp, Homo sapiens
cagtctacagccccc

SEQ ID NO: 46123 - DNA, 15 bp, Homo sapiens
agtctacagccccca

SEQ ID NO: 46124 - DNA, 15 bp, Homo sapiens
gtctacagcccccag

SEQ ID NO: 46125 - DNA, 15 bp, Homo sapiens
tctacagcccccagc

SEQ ID NO: 46126 - DNA, 15 bp, Homo sapiens
ctacagcccccagcg

SEQ ID NO: 46127 - DNA, 15 bp, Homo sapiens
tacagcccccagcgt

SEQ ID NO: 46128 - DNA, 15 bp, Homo sapiens
acagcccccagcgtg

SEQ ID NO: 46129 - DNA, 15 bp, Homo sapiens
cagcccccagcgtga

SEQ ID NO: 46130 - DNA, 15 bp, Homo sapiens
agcccccagcgtgag

SEQ ID NO: 46131 - DNA, 15 bp, Homo sapiens
gcccccagcgtgagt

SEQ ID NO: 46132 - DNA, 15 bp, Homo sapiens
cccccagcgtgagtg

SEQ ID NO: 46133 - DNA, 15 bp, Homo sapiens
ccccagcgtgagtga

SEQ ID NO: 46134 - DNA, 15 bp, Homo sapiens
cccagcgtgagtgat

SEQ ID NO: 46135 - DNA, 15 bp, Homo sapiens
ccagcgtgagtgatg

SEQ ID NO: 46136 - DNA, 15 bp, Homo sapiens
cagcgtgagtgatgc

SEQ ID NO: 46137 - DNA, 15 bp, Homo sapiens
agcgtgagtgatgca

SEQ ID NO: 46138 - DNA, 15 bp, Homo sapiens
gcgtgagtgatgcag

SEQ ID NO: 46139 - DNA, 15 bp, Homo sapiens
cgtgagtgatgcaga

SEQ ID NO: 46140 - DNA, 15 bp, Homo sapiens
gtgagtgatgcagaa

SEQ ID NO: 46141 - DNA, 15 bp, Homo sapiens
tgagtgatgcagaag

SEQ ID NO: 46142 - DNA, 15 bp, Homo sapiens
gagtgatgcagaaga

SEQ ID NO: 46143 - DNA, 15 bp, Homo sapiens
agtgatgcagaagac

SEQ ID NO: 46144 - DNA, 15 bp, Homo sapiens
gtgatgcagaagacg

SEQ ID NO: 46145 - DNA, 15 bp, Homo sapiens
tgatgcagaagacgg

SEQ ID NO: 46146 - DNA, 15 bp, Homo sapiens
gatgcagaagacggg

SEQ ID NO: 46147 - DNA, 15 bp, Homo sapiens
atgcagaagacgggt

SEQ ID NO: 46148 - DNA, 15 bp, Homo sapiens
tgcagaagacgggtg

SEQ ID NO: 46149 - DNA, 15 bp, Homo sapiens
gcagaagacgggtga

SEQ ID NO: 46150 - DNA, 15 bp, Homo sapiens
cagaagacgggtgat

SEQ ID NO: 46151 - DNA, 15 bp, Homo sapiens
agaagacgggtgatt

SEQ ID NO: 46152 - DNA, 15 bp, Homo sapiens
gaagacgggtgattt

SEQ ID NO: 46153 - DNA, 15 bp, Homo sapiens
aagacgggtgatttc

SEQ ID NO: 46154 - DNA, 15 bp, Homo sapiens
agacgggtgatttct

SEQ ID NO: 46155 - DNA, 15 bp, Homo sapiens
gacgggtgatttctg

SEQ ID NO: 46156 - DNA, 15 bp, Homo sapiens
acgggtgatttctgc

SEQ ID NO: 46157 - DNA, 15 bp, Homo sapiens
cgggtgatttctgca

SEQ ID NO: 46158 - DNA, 15 bp, Homo sapiens
gggtgatttctgcat

SEQ ID NO: 46159 - DNA, 15 bp, Homo sapiens
ggtgatttctgcatt

SEQ ID NO: 46160 - DNA, 15 bp, Homo sapiens
gtgatttctgcattt

SEQ ID NO: 46161 - DNA, 15 bp, Homo sapiens
tgatttctgcatttc

SEQ ID NO: 46162 - DNA, 15 bp, Homo sapiens
gatttctgcatttcc

SEQ ID NO: 46163 - DNA, 15 bp, Homo sapiens
atttctgcatttcca

SEQ ID NO: 46164 - DNA, 15 bp, Homo sapiens
tttctgcatttccaa

SEQ ID NO: 46165 - DNA, 15 bp, Homo sapiens
ttctgcatttccaac

SEQ ID NO: 46166 - DNA, 15 bp, Homo sapiens
tctgcatttccaact

SEQ ID NO: 46167 - DNA, 15 bp, Homo sapiens
ctgcatttccaactg

SEQ ID NO: 46168 - DNA, 15 bp, Homo sapiens
tgcatttccaactga

SEQ ID NO: 46169 - DNA, 15 bp, Homo sapiens
gcatttccaactgag

SEQ ID NO: 46170 - DNA, 15 bp, Homo sapiens
catttccaactgagg

SEQ ID NO: 46171 - DNA, 15 bp, Homo sapiens
atttccaactgaggt

SEQ ID NO: 46172 - DNA, 15 bp, Homo sapiens
tttccaactgaggta

SEQ ID NO: 46173 - DNA, 15 bp, Homo sapiens
ttccaactgaggtac

SEQ ID NO: 46174 - DNA, 15 bp, Homo sapiens
tccaactgaggtacc

SEQ ID NO: 46175 - DNA, 15 bp, Homo sapiens
ccaactgaggtaccg

SEQ ID NO: 46176 - DNA, 15 bp, Homo sapiens
caactgaggtaccgg

SEQ ID NO: 46177 - DNA, 15 bp, Homo sapiens
aactgaggtaccggg

SEQ ID NO: 46178 - DNA, 15 bp, Homo sapiens
actgaggtaccgggt

SEQ ID NO: 46179 - DNA, 15 bp, Homo sapiens
ctgaggtaccgggtt

SEQ ID NO: 46180 - DNA, 15 bp, Homo sapiens
tgaggtaccgggttc

SEQ ID NO: 46181 - DNA, 15 bp, Homo sapiens
gaggtaccgggttca

SEQ ID NO: 46182 - DNA, 15 bp, Homo sapiens
aggtaccgggttcat

SEQ ID NO: 46183 - DNA, 15 bp, Homo sapiens
ggtaccgggttcatc

SEQ ID NO: 46184 - DNA, 15 bp, Homo sapiens
gtaccgggttcatct

SEQ ID NO: 46185 - DNA, 15 bp, Homo sapiens
taccgggttcatctc

SEQ ID NO: 46186 - DNA, 15 bp, Homo sapiens
accgggttcatctca

SEQ ID NO: 46187 - DNA, 15 bp, Homo sapiens
ccgggttcatctcac

SEQ ID NO: 46188 - DNA, 15 bp, Homo sapiens
cgggttcatctcact

SEQ ID NO: 46189 - DNA, 15 bp, Homo sapiens
gggttcatctcactg

SEQ ID NO: 46190 - DNA, 15 bp, Homo sapiens
ggttcatctcactgg

SEQ ID NO: 46191 - DNA, 15 bp, Homo sapiens
gttcatctcactggg

SEQ ID NO: 46192 - DNA, 15 bp, Homo sapiens
ttcatctcactgggg

SEQ ID NO: 46193 - DNA, 15 bp, Homo sapiens
tcatctcactggggc

SEQ ID NO: 46194 - DNA, 15 bp, Homo sapiens
catctcactggggct

SEQ ID NO: 46195 - DNA, 15 bp, Homo sapiens
atctcactggggctt

SEQ ID NO: 46196 - DNA, 15 bp, Homo sapiens
tctcactggggcttg

SEQ ID NO: 46197 - DNA, 15 bp, Homo sapiens
ctcactggggcttgt

SEQ ID NO: 46198 - DNA, 15 bp, Homo sapiens
tcactggggcttgtc

SEQ ID NO: 46199 - DNA, 15 bp, Homo sapiens
cactggggcttgtca

SEQ ID NO: 46200 - DNA, 15 bp, Homo sapiens
actggggcttgtcag

SEQ ID NO: 46201 - DNA, 15 bp, Homo sapiens
ctggggcttgtcaga

SEQ ID NO: 46202 - DNA, 15 bp, Homo sapiens
tggggcttgtcagac

SEQ ID NO: 46203 - DNA, 15 bp, Homo sapiens
ggggcttgtcagaca

SEQ ID NO: 46204 - DNA, 15 bp, Homo sapiens
gggcttgtcagacag

SEQ ID NO: 46205 - DNA, 15 bp, Homo sapiens
ggcttgtcagacagt

SEQ ID NO: 46206 - DNA, 15 bp, Homo sapiens
gcttgtcagacagtg

SEQ ID NO: 46207 - DNA, 15 bp, Homo sapiens
cttgtcagacagtgg

SEQ ID NO: 46208 - DNA, 15 bp, Homo sapiens
ttgtcagacagtggg

SEQ ID NO: 46209 - DNA, 15 bp, Homo sapiens
tgtcagacagtgggt

SEQ ID NO: 46210 - DNA, 15 bp, Homo sapiens
gtcagacagtgggta

SEQ ID NO: 46211 - DNA, 15 bp, Homo sapiens
tcagacagtgggtac

SEQ ID NO: 46212 - DNA, 15 bp, Homo sapiens
cagacagtgggtaca

SEQ ID NO: 46213 - DNA, 15 bp, Homo sapiens
agacagtgggtacaa

SEQ ID NO: 46214 - DNA, 15 bp, Homo sapiens
gacagtgggtacaac

SEQ ID NO: 46215 - DNA, 15 bp, Homo sapiens
acagtgggtacaacc

SEQ ID NO: 46216 - DNA, 15 bp, Homo sapiens
cagtgggtacaaccc

SEQ ID NO: 46217 - DNA, 15 bp, Homo sapiens
agtgggtacaaccca

SEQ ID NO: 46218 - DNA, 15 bp, Homo sapiens
gtgggtacaacccac

SEQ ID NO: 46219 - DNA, 15 bp, Homo sapiens
tgggtacaacccacg

SEQ ID NO: 46220 - DNA, 15 bp, Homo sapiens
gggtacaacccacgg

SEQ ID NO: 46221 - DNA, 15 bp, Homo sapiens
ggtacaacccacgga

SEQ ID NO: 46222 - DNA, 15 bp, Homo sapiens
gtacaacccacggag

SEQ ID NO: 46223 - DNA, 15 bp, Homo sapiens
tacaacccacggagc

SEQ ID NO: 46224 - DNA, 15 bp, Homo sapiens
acaacccacggagca

SEQ ID NO: 46225 - DNA, 15 bp, Homo sapiens
caacccacggagcat

SEQ ID NO: 46226 - DNA, 15 bp, Homo sapiens
aacccacggagcatg

SEQ ID NO: 46227 - DNA, 15 bp, Homo sapiens
acccacggagcatga

SEQ ID NO: 46228 - DNA, 15 bp, Homo sapiens
cccacggagcatgag

SEQ ID NO: 46229 - DNA, 15 bp, Homo sapiens
ccacggagcatgagc

SEQ ID NO: 46230 - DNA, 15 bp, Homo sapiens
cacggagcatgagcc

SEQ ID NO: 46231 - DNA, 15 bp, Homo sapiens
acggagcatgagcca

SEQ ID NO: 46232 - DNA, 15 bp, Homo sapiens
cggagcatgagccaa

SEQ ID NO: 46233 - DNA, 15 bp, Homo sapiens
ggagcatgagccaaa

SEQ ID NO: 46234 - DNA, 15 bp, Homo sapiens
gagcatgagccaaag

SEQ ID NO: 46235 - DNA, 15 bp, Homo sapiens
agcatgagccaaagc

SEQ ID NO: 46236 - DNA, 15 bp, Homo sapiens
gcatgagccaaagca

SEQ ID NO: 46237 - DNA, 15 bp, Homo sapiens
catgagccaaagcag

SEQ ID NO: 46238 - DNA, 15 bp, Homo sapiens
atgagccaaagcagg

SEQ ID NO: 46239 - DNA, 15 bp, Homo sapiens
tgagccaaagcaggg

SEQ ID NO: 46240 - DNA, 15 bp, Homo sapiens
gagccaaagcagggt

SEQ ID NO: 46241 - DNA, 15 bp, Homo sapiens
agccaaagcagggtg

SEQ ID NO: 46242 - DNA, 15 bp, Homo sapiens
gccaaagcagggtgg

SEQ ID NO: 46243 - DNA, 15 bp, Homo sapiens
ccaaagcagggtggg

SEQ ID NO: 46244 - DNA, 15 bp, Homo sapiens
caaagcagggtgggg

SEQ ID NO: 46245 - DNA, 15 bp, Homo sapiens
aaagcagggtggggc

SEQ ID NO: 46246 - DNA, 15 bp, Homo sapiens
aagcagggtggggca

SEQ ID NO: 46247 - DNA, 15 bp, Homo sapiens
agcagggtggggcat

SEQ ID NO: 46248 - DNA, 15 bp, Homo sapiens
gcagggtggggcatc

SEQ ID NO: 46249 - DNA, 15 bp, Homo sapiens
cagggtggggcatca

SEQ ID NO: 46250 - DNA, 15 bp, Homo sapiens
agggtggggcatcac

SEQ ID NO: 46251 - DNA, 15 bp, Homo sapiens
gggtggggcatcacc

SEQ ID NO: 46252 - DNA, 15 bp, Homo sapiens
ggtggggcatcacct

SEQ ID NO: 46253 - DNA, 15 bp, Homo sapiens
gtggggcatcacctc

SEQ ID NO: 46254 - DNA, 15 bp, Homo sapiens
tggggcatcacctca

SEQ ID NO: 46255 - DNA, 15 bp, Homo sapiens
ggggcatcacctcac

SEQ ID NO: 46256 - DNA, 15 bp, Homo sapiens
gggcatcacctcacc

SEQ ID NO: 46257 - DNA, 15 bp, Homo sapiens
ggcatcacctcaccc

SEQ ID NO: 46258 - DNA, 15 bp, Homo sapiens
gcatcacctcaccca

SEQ ID NO: 46259 - DNA, 15 bp, Homo sapiens
catcacctcacccag

SEQ ID NO: 46260 - DNA, 15 bp, Homo sapiens
atcacctcacccagg

SEQ ID NO: 46261 - DNA, 15 bp, Homo sapiens
tcacctcacccagga

SEQ ID NO: 46262 - DNA, 15 bp, Homo sapiens
cacctcacccaggaa

SEQ ID NO: 46263 - DNA, 15 bp, Homo sapiens
acctcacccaggaag

SEQ ID NO: 46264 - DNA, 15 bp, Homo sapiens
cctcacccaggaagc

SEQ ID NO: 46265 - DNA, 15 bp, Homo sapiens
ctcacccaggaagca

SEQ ID NO: 46266 - DNA, 15 bp, Homo sapiens
tcacccaggaagcac

SEQ ID NO: 46267 - DNA, 15 bp, Homo sapiens
cacccaggaagcaca

SEQ ID NO: 46268 - DNA, 15 bp, Homo sapiens
acccaggaagcacaa

SEQ ID NO: 46269 - DNA, 15 bp, Homo sapiens
cccaggaagcacaag

SEQ ID NO: 46270 - DNA, 15 bp, Homo sapiens
ccaggaagcacaagg

SEQ ID NO: 46271 - DNA, 15 bp, Homo sapiens
caggaagcacaaggg

SEQ ID NO: 46272 - DNA, 15 bp, Homo sapiens
aggaagcacaagggg

SEQ ID NO: 46273 - DNA, 15 bp, Homo sapiens
ggaagcacaaggggt

SEQ ID NO: 46274 - DNA, 15 bp, Homo sapiens
gaagcacaaggggtt

SEQ ID NO: 46275 - DNA, 15 bp, Homo sapiens
aagcacaaggggttg

SEQ ID NO: 46276 - DNA, 15 bp, Homo sapiens
agcacaaggggttgg

SEQ ID NO: 46277 - DNA, 15 bp, Homo sapiens
gcacaaggggttggg

SEQ ID NO: 46278 - DNA, 15 bp, Homo sapiens
cacaaggggttgggg

SEQ ID NO: 46279 - DNA, 15 bp, Homo sapiens
acaaggggttgggga

SEQ ID NO: 46280 - DNA, 15 bp, Homo sapiens
caaggggttggggaa

SEQ ID NO: 46281 - DNA, 15 bp, Homo sapiens
aaggggttggggaat

SEQ ID NO: 46282 - DNA, 15 bp, Homo sapiens
aggggttggggaatt

SEQ ID NO: 46283 - DNA, 15 bp, Homo sapiens
ggggttggggaattc

SEQ ID NO: 46284 - DNA, 15 bp, Homo sapiens
gggttggggaattcc

SEQ ID NO: 46285 - DNA, 15 bp, Homo sapiens
ggttggggaattccc

SEQ ID NO: 46286 - DNA, 15 bp, Homo sapiens
gttggggaattccct

SEQ ID NO: 46287 - DNA, 15 bp, Homo sapiens
ttggggaattccctt

SEQ ID NO: 46288 - DNA, 15 bp, Homo sapiens
tggggaattcccttt

SEQ ID NO: 46289 - DNA, 15 bp, Homo sapiens
ggggaattccctttc

SEQ ID NO: 46290 - DNA, 15 bp, Homo sapiens
gggaattccctttcc

SEQ ID NO: 46291 - DNA, 15 bp, Homo sapiens
ggaattccctttcct

SEQ ID NO: 46292 - DNA, 15 bp, Homo sapiens
gaattccctttccta

SEQ ID NO: 46293 - DNA, 15 bp, Homo sapiens
aattccctttcctag

SEQ ID NO: 46294 - DNA, 15 bp, Homo sapiens
attccctttcctagc

SEQ ID NO: 46295 - DNA, 15 bp, Homo sapiens
ttccctttcctagcc

SEQ ID NO: 46296 - DNA, 15 bp, Homo sapiens
tccctttcctagcca

SEQ ID NO: 46297 - DNA, 15 bp, Homo sapiens
ccctttcctagccaa

SEQ ID NO: 46298 - DNA, 15 bp, Homo sapiens
cctttcctagccaag

SEQ ID NO: 46299 - DNA, 15 bp, Homo sapiens
ctttcctagccaagg

SEQ ID NO: 46300 - DNA, 15 bp, Homo sapiens
tttcctagccaaggg

SEQ ID NO: 46301 - DNA, 15 bp, Homo sapiens
ttcctagccaaggga

SEQ ID NO: 46302 - DNA, 15 bp, Homo sapiens
tcctagccaagggaa

SEQ ID NO: 46303 - DNA, 15 bp, Homo sapiens
cctagccaagggaag

SEQ ID NO: 46304 - DNA, 15 bp, Homo sapiens
ctagccaagggaagc

SEQ ID NO: 46305 - DNA, 15 bp, Homo sapiens
tagccaagggaagcc

SEQ ID NO: 46306 - DNA, 15 bp, Homo sapiens
agccaagggaagcca

SEQ ID NO: 46307 - DNA, 15 bp, Homo sapiens
gccaagggaagccat

SEQ ID NO: 46308 - DNA, 15 bp, Homo sapiens
ccaagggaagccatg

SEQ ID NO: 46309 - DNA, 15 bp, Homo sapiens
caagggaagccatga

SEQ ID NO: 46310 - DNA, 15 bp, Homo sapiens
aagggaagccatgac

SEQ ID NO: 46311 - DNA, 15 bp, Homo sapiens
agggaagccatgact

SEQ ID NO: 46312 - DNA, 15 bp, Homo sapiens
gggaagccatgactg

SEQ ID NO: 46313 - DNA, 15 bp, Homo sapiens
ggaagccatgactga

SEQ ID NO: 46314 - DNA, 15 bp, Homo sapiens
gaagccatgactgac

SEQ ID NO: 46315 - DNA, 15 bp, Homo sapiens
aagccatgactgacg

SEQ ID NO: 46316 - DNA, 15 bp, Homo sapiens
agccatgactgacgg

SEQ ID NO: 46317 - DNA, 15 bp, Homo sapiens
gccatgactgacggt

SEQ ID NO: 46318 - DNA, 15 bp, Homo sapiens
ccatgactgacggta

SEQ ID NO: 46319 - DNA, 15 bp, Homo sapiens
catgactgacggtac

SEQ ID NO: 46320 - DNA, 15 bp, Homo sapiens
atgactgacggtacc

SEQ ID NO: 46321 - DNA, 15 bp, Homo sapiens
tgactgacggtacct

SEQ ID NO: 46322 - DNA, 15 bp, Homo sapiens
gactgacggtacctg

SEQ ID NO: 46323 - DNA, 15 bp, Homo sapiens
actgacggtacctgg

SEQ ID NO: 46324 - DNA, 15 bp, Homo sapiens
ctgacggtacctgga

SEQ ID NO: 46325 - DNA, 15 bp, Homo sapiens
tgacggtacctggaa

SEQ ID NO: 46326 - DNA, 15 bp, Homo sapiens
gacggtacctggaaa

SEQ ID NO: 46327 - DNA, 15 bp, Homo sapiens
acggtacctggaaaa

SEQ ID NO: 46328 - DNA, 15 bp, Homo sapiens
cggtacctggaaaat

SEQ ID NO: 46329 - DNA, 15 bp, Homo sapiens
ggtacctggaaaatc

SEQ ID NO: 46330 - DNA, 15 bp, Homo sapiens
gtacctggaaaatca

SEQ ID NO: 46331 - DNA, 15 bp, Homo sapiens
tacctggaaaatcag

SEQ ID NO: 46332 - DNA, 15 bp, Homo sapiens
acctggaaaatcagg

SEQ ID NO: 46333 - DNA, 15 bp, Homo sapiens
cctggaaaatcagga

SEQ ID NO: 46334 - DNA, 15 bp, Homo sapiens
ctggaaaatcaggac

SEQ ID NO: 46335 - DNA, 15 bp, Homo sapiens
tggaaaatcaggaca

SEQ ID NO: 46336 - DNA, 15 bp, Homo sapiens
ggaaaatcaggacac

SEQ ID NO: 46337 - DNA, 15 bp, Homo sapiens
gaaaatcaggacact

SEQ ID NO: 46338 - DNA, 15 bp, Homo sapiens
aaaatcaggacactc

SEQ ID NO: 46339 - DNA, 15 bp, Homo sapiens
aaatcaggacactcc

SEQ ID NO: 46340 - DNA, 15 bp, Homo sapiens
aatcaggacactccc

SEQ ID NO: 46341 - DNA, 15 bp, Homo sapiens
atcaggacactcccc

SEQ ID NO: 46342 - DNA, 15 bp, Homo sapiens
tcaggacactcccca

SEQ ID NO: 46343 - DNA, 15 bp, Homo sapiens
caggacactccccac

SEQ ID NO: 46344 - DNA, 15 bp, Homo sapiens
aggacactccccacc

SEQ ID NO: 46345 - DNA, 15 bp, Homo sapiens
ggacactccccaccc

SEQ ID NO: 46346 - DNA, 15 bp, Homo sapiens
gacactccccaccct

SEQ ID NO: 46347 - DNA, 15 bp, Homo sapiens
acactccccacccta

SEQ ID NO: 46348 - DNA, 15 bp, Homo sapiens
cactccccaccctaa

SEQ ID NO: 46349 - DNA, 15 bp, Homo sapiens
actccccaccctaat

SEQ ID NO: 46350 - DNA, 15 bp, Homo sapiens
ctccccaccctaata

SEQ ID NO: 46351 - DNA, 15 bp, Homo sapiens
tccccaccctaatac

SEQ ID NO: 46352 - DNA, 15 bp, Homo sapiens
ccccaccctaatact

SEQ ID NO: 46353 - DNA, 15 bp, Homo sapiens
cccaccctaatactg

SEQ ID NO: 46354 - DNA, 15 bp, Homo sapiens
ccaccctaatactgt

SEQ ID NO: 46355 - DNA, 15 bp, Homo sapiens
caccctaatactgtg

SEQ ID NO: 46356 - DNA, 15 bp, Homo sapiens
accctaatactgtgc

SEQ ID NO: 46357 - DNA, 15 bp, Homo sapiens
ccctaatactgtgct

SEQ ID NO: 46358 - DNA, 15 bp, Homo sapiens
cctaatactgtgctt

SEQ ID NO: 46359 - DNA, 15 bp, Homo sapiens
ctaatactgtgcttt

SEQ ID NO: 46360 - DNA, 15 bp, Homo sapiens
taatactgtgctttt

SEQ ID NO: 46361 - DNA, 15 bp, Homo sapiens
aatactgtgcttttc

SEQ ID NO: 46362 - DNA, 15 bp, Homo sapiens
atactgtgcttttcc

SEQ ID NO: 46363 - DNA, 15 bp, Homo sapiens
tactgtgcttttcca

SEQ ID NO: 46364 - DNA, 15 bp, Homo sapiens
actgtgcttttccaa

SEQ ID NO: 46365 - DNA, 15 bp, Homo sapiens
ctgtgcttttccaat

SEQ ID NO: 46366 - DNA, 15 bp, Homo sapiens
tgtgcttttccaatg

SEQ ID NO: 46367 - DNA, 15 bp, Homo sapiens
gtgcttttccaatgg

SEQ ID NO: 46368 - DNA, 15 bp, Homo sapiens
tgcttttccaatggt

SEQ ID NO: 46369 - DNA, 15 bp, Homo sapiens
gcttttccaatggtc

SEQ ID NO: 46370 - DNA, 15 bp, Homo sapiens
cttttccaatggtct

SEQ ID NO: 46371 - DNA, 15 bp, Homo sapiens
ttttccaatggtctt

SEQ ID NO: 46372 - DNA, 15 bp, Homo sapiens
tttccaatggtctta

SEQ ID NO: 46373 - DNA, 15 bp, Homo sapiens
ttccaatggtcttag

SEQ ID NO: 46374 - DNA, 15 bp, Homo sapiens
tccaatggtcttagc

SEQ ID NO: 46375 - DNA, 15 bp, Homo sapiens
ccaatggtcttagca

SEQ ID NO: 46376 - DNA, 15 bp, Homo sapiens
caatggtcttagcaa

SEQ ID NO: 46377 - DNA, 15 bp, Homo sapiens
aatggtcttagcaaa

SEQ ID NO: 46378 - DNA, 15 bp, Homo sapiens
atggtcttagcaaac

SEQ ID NO: 46379 - DNA, 15 bp, Homo sapiens
tggtcttagcaaacg

SEQ ID NO: 46380 - DNA, 15 bp, Homo sapiens
ggtcttagcaaacgg

SEQ ID NO: 46381 - DNA, 15 bp, Homo sapiens
gtcttagcaaacggc

SEQ ID NO: 46382 - DNA, 15 bp, Homo sapiens
tcttagcaaacggca

SEQ ID NO: 46383 - DNA, 15 bp, Homo sapiens
cttagcaaacggcac

SEQ ID NO: 46384 - DNA, 15 bp, Homo sapiens
ttagcaaacggcaca

SEQ ID NO: 46385 - DNA, 15 bp, Homo sapiens
tagcaaacggcacac

SEQ ID NO: 46386 - DNA, 15 bp, Homo sapiens
agcaaacggcacacc

SEQ ID NO: 46387 - DNA, 15 bp, Homo sapiens
gcaaacggcacacca

SEQ ID NO: 46388 - DNA, 15 bp, Homo sapiens
caaacggcacaccag

SEQ ID NO: 46389 - DNA, 15 bp, Homo sapiens
aaacggcacaccagg

SEQ ID NO: 46390 - DNA, 15 bp, Homo sapiens
aacggcacaccagga

SEQ ID NO: 46391 - DNA, 15 bp, Homo sapiens
acggcacaccaggag

SEQ ID NO: 46392 - DNA, 15 bp, Homo sapiens
cggcacaccaggaga

SEQ ID NO: 46393 - DNA, 15 bp, Homo sapiens
ggcacaccaggagat

SEQ ID NO: 46394 - DNA, 15 bp, Homo sapiens
gcacaccaggagatt

SEQ ID NO: 46395 - DNA, 15 bp, Homo sapiens
cacaccaggagatta

SEQ ID NO: 46396 - DNA, 15 bp, Homo sapiens
acaccaggagattat

SEQ ID NO: 46397 - DNA, 15 bp, Homo sapiens
caccaggagattatg

SEQ ID NO: 46398 - DNA, 15 bp, Homo sapiens
accaggagattatgt

SEQ ID NO: 46399 - DNA, 15 bp, Homo sapiens
ccaggagattatgtc

SEQ ID NO: 46400 - DNA, 15 bp, Homo sapiens
caggagattatgtcc

SEQ ID NO: 46401 - DNA, 15 bp, Homo sapiens
aggagattatgtccc

SEQ ID NO: 46402 - DNA, 15 bp, Homo sapiens
ggagattatgtccca

SEQ ID NO: 46403 - DNA, 15 bp, Homo sapiens
gagattatgtcccag

SEQ ID NO: 46404 - DNA, 15 bp, Homo sapiens
agattatgtcccagg

SEQ ID NO: 46405 - DNA, 15 bp, Homo sapiens
gattatgtcccaggc

SEQ ID NO: 46406 - DNA, 15 bp, Homo sapiens
attatgtcccaggcc

SEQ ID NO: 46407 - DNA, 15 bp, Homo sapiens
ttatgtcccaggcct

SEQ ID NO: 46408 - DNA, 15 bp, Homo sapiens
tatgtcccaggcctg

SEQ ID NO: 46409 - DNA, 15 bp, Homo sapiens
atgtcccaggcctgg

SEQ ID NO: 46410 - DNA, 15 bp, Homo sapiens
tgtcccaggcctggc

SEQ ID NO: 46411 - DNA, 15 bp, Homo sapiens
gtcccaggcctggct

SEQ ID NO: 46412 - DNA, 15 bp, Homo sapiens
tcccaggcctggctc

SEQ ID NO: 46413 - DNA, 15 bp, Homo sapiens
cccaggcctggctcg

SEQ ID NO: 46414 - DNA, 15 bp, Homo sapiens
ccaggcctggctcgg

SEQ ID NO: 46415 - DNA, 15 bp, Homo sapiens
caggcctggctcgga

SEQ ID NO: 46416 - DNA, 15 bp, Homo sapiens
aggcctggctcggag

SEQ ID NO: 46417 - DNA, 15 bp, Homo sapiens
ggcctggctcggagg

SEQ ID NO: 46418 - DNA, 15 bp, Homo sapiens
gcctggctcggaggg

SEQ ID NO: 46419 - DNA, 15 bp, Homo sapiens
cctggctcggagggt

SEQ ID NO: 46420 - DNA, 15 bp, Homo sapiens
ctggctcggagggtc

SEQ ID NO: 46421 - DNA, 15 bp, Homo sapiens
tggctcggagggtcc

SEQ ID NO: 46422 - DNA, 15 bp, Homo sapiens
ggctcggagggtccc

SEQ ID NO: 46423 - DNA, 15 bp, Homo sapiens
gctcggagggtccca

SEQ ID NO: 46424 - DNA, 15 bp, Homo sapiens
ctcggagggtcccat

SEQ ID NO: 46425 - DNA, 15 bp, Homo sapiens
tcggagggtcccatg

SEQ ID NO: 46426 - DNA, 15 bp, Homo sapiens
cggagggtcccatgc

SEQ ID NO: 46427 - DNA, 15 bp, Homo sapiens
ggagggtcccatgcc

SEQ ID NO: 46428 - DNA, 15 bp, Homo sapiens
gagggtcccatgccc

SEQ ID NO: 46429 - DNA, 15 bp, Homo sapiens
agggtcccatgccca

SEQ ID NO: 46430 - DNA, 15 bp, Homo sapiens
gggtcccatgcccac

SEQ ID NO: 46431 - DNA, 15 bp, Homo sapiens
ggtcccatgcccacg

SEQ ID NO: 46432 - DNA, 15 bp, Homo sapiens
gtcccatgcccacgg

SEQ ID NO: 46433 - DNA, 15 bp, Homo sapiens
tcccatgcccacgga

SEQ ID NO: 46434 - DNA, 15 bp, Homo sapiens
cccatgcccacggag

SEQ ID NO: 46435 - DNA, 15 bp, Homo sapiens
ccatgcccacggagc

SEQ ID NO: 46436 - DNA, 15 bp, Homo sapiens
catgcccacggagcc

SEQ ID NO: 46437 - DNA, 15 bp, Homo sapiens
atgcccacggagcct

SEQ ID NO: 46438 - DNA, 15 bp, Homo sapiens
tgcccacggagcctg

SEQ ID NO: 46439 - DNA, 15 bp, Homo sapiens
gcccacggagcctgg

SEQ ID NO: 46440 - DNA, 15 bp, Homo sapiens
cccacggagcctggc

SEQ ID NO: 46441 - DNA, 15 bp, Homo sapiens
ccacggagcctggct

SEQ ID NO: 46442 - DNA, 15 bp, Homo sapiens
cacggagcctggctc

SEQ ID NO: 46443 - DNA, 15 bp, Homo sapiens
acggagcctggctca

SEQ ID NO: 46444 - DNA, 15 bp, Homo sapiens
cggagcctggctcac

SEQ ID NO: 46445 - DNA, 15 bp, Homo sapiens
ggagcctggctcact

SEQ ID NO: 46446 - DNA, 15 bp, Homo sapiens
gagcctggctcactg

SEQ ID NO: 46447 - DNA, 15 bp, Homo sapiens
agcctggctcactgc

SEQ ID NO: 46448 - DNA, 15 bp, Homo sapiens
gcctggctcactgct

SEQ ID NO: 46449 - DNA, 15 bp, Homo sapiens
cctggctcactgcta

SEQ ID NO: 46450 - DNA, 15 bp, Homo sapiens
ctggctcactgctag

SEQ ID NO: 46451 - DNA, 15 bp, Homo sapiens
tggctcactgctagc

SEQ ID NO: 46452 - DNA, 15 bp, Homo sapiens
ggctcactgctagca

SEQ ID NO: 46453 - DNA, 15 bp, Homo sapiens
gctcactgctagcac

SEQ ID NO: 46454 - DNA, 15 bp, Homo sapiens
ctcactgctagcaca

SEQ ID NO: 46455 - DNA, 15 bp, Homo sapiens
tcactgctagcacag

SEQ ID NO: 46456 - DNA, 15 bp, Homo sapiens
cactgctagcacagc

SEQ ID NO: 46457 - DNA, 15 bp, Homo sapiens
actgctagcacagca

SEQ ID NO: 46458 - DNA, 15 bp, Homo sapiens
ctgctagcacagcag

SEQ ID NO: 46459 - DNA, 15 bp, Homo sapiens
tgctagcacagcagt

SEQ ID NO: 46460 - DNA, 15 bp, Homo sapiens
gctagcacagcagtc

SEQ ID NO: 46461 - DNA, 15 bp, Homo sapiens
ctagcacagcagtct

SEQ ID NO: 46462 - DNA, 15 bp, Homo sapiens
tagcacagcagtctg

SEQ ID NO: 46463 - DNA, 15 bp, Homo sapiens
agcacagcagtctga

SEQ ID NO: 46464 - DNA, 15 bp, Homo sapiens
gcacagcagtctgag

SEQ ID NO: 46465 - DNA, 15 bp, Homo sapiens
cacagcagtctgaga

SEQ ID NO: 46466 - DNA, 15 bp, Homo sapiens
acagcagtctgagat

SEQ ID NO: 46467 - DNA, 15 bp, Homo sapiens
cagcagtctgagatc

SEQ ID NO: 46468 - DNA, 15 bp, Homo sapiens
agcagtctgagatcg

SEQ ID NO: 46469 - DNA, 15 bp, Homo sapiens
gcagtctgagatcga

SEQ ID NO: 46470 - DNA, 15 bp, Homo sapiens
cagtctgagatcgaa

SEQ ID NO: 46471 - DNA, 15 bp, Homo sapiens
agtctgagatcgaac

SEQ ID NO: 46472 - DNA, 15 bp, Homo sapiens
gtctgagatcgaact

SEQ ID NO: 46473 - DNA, 15 bp, Homo sapiens
tctgagatcgaactg

SEQ ID NO: 46474 - DNA, 15 bp, Homo sapiens
ctgagatcgaactgc

SEQ ID NO: 46475 - DNA, 15 bp, Homo sapiens
tgagatcgaactgca

SEQ ID NO: 46476 - DNA, 15 bp, Homo sapiens
gagatcgaactgcaa

SEQ ID NO: 46477 - DNA, 15 bp, Homo sapiens
agatcgaactgcaaa

SEQ ID NO: 46478 - DNA, 15 bp, Homo sapiens
gatcgaactgcaaag

SEQ ID NO: 46479 - DNA, 15 bp, Homo sapiens
atcgaactgcaaagc

SEQ ID NO: 46480 - DNA, 15 bp, Homo sapiens
tcgaactgcaaagca

SEQ ID NO: 46481 - DNA, 15 bp, Homo sapiens
cgaactgcaaagcag

SEQ ID NO: 46482 - DNA, 15 bp, Homo sapiens
gaactgcaaagcagc

SEQ ID NO: 46483 - DNA, 15 bp, Homo sapiens
aactgcaaagcagca

SEQ ID NO: 46484 - DNA, 15 bp, Homo sapiens
actgcaaagcagcag

SEQ ID NO: 46485 - DNA, 15 bp, Homo sapiens
ctgcaaagcagcagc

SEQ ID NO: 46486 - DNA, 15 bp, Homo sapiens
tgcaaagcagcagcg

SEQ ID NO: 46487 - DNA, 15 bp, Homo sapiens
gcaaagcagcagcga

SEQ ID NO: 46488 - DNA, 15 bp, Homo sapiens
caaagcagcagcgag

SEQ ID NO: 46489 - DNA, 15 bp, Homo sapiens
aaagcagcagcgagg

SEQ ID NO: 46490 - DNA, 15 bp, Homo sapiens
aagcagcagcgaggc

SEQ ID NO: 46491 - DNA, 15 bp, Homo sapiens
agcagcagcgaggct

SEQ ID NO: 46492 - DNA, 15 bp, Homo sapiens
gcagcagcgaggctg

SEQ ID NO: 46493 - DNA, 15 bp, Homo sapiens
cagcagcgaggctgg

SEQ ID NO: 46494 - DNA, 15 bp, Homo sapiens
agcagcgaggctggg

SEQ ID NO: 46495 - DNA, 15 bp, Homo sapiens
gcagcgaggctgggg

SEQ ID NO: 46496 - DNA, 15 bp, Homo sapiens
cagcgaggctggggg

SEQ ID NO: 46497 - DNA, 15 bp, Homo sapiens
agcgaggctggggga

SEQ ID NO: 46498 - DNA, 15 bp, Homo sapiens
gcgaggctgggggag

SEQ ID NO: 46499 - DNA, 15 bp, Homo sapiens
cgaggctgggggagg

SEQ ID NO: 46500 - DNA, 15 bp, Homo sapiens
gaggctgggggaggg

SEQ ID NO: 46501 - DNA, 15 bp, Homo sapiens
aggctgggggagggg

SEQ ID NO: 46502 - DNA, 15 bp, Homo sapiens
ggctgggggaggggt

SEQ ID NO: 46503 - DNA, 15 bp, Homo sapiens
gctgggggaggggtg

SEQ ID NO: 46504 - DNA, 15 bp, Homo sapiens
ctgggggaggggtgt

SEQ ID NO: 46505 - DNA, 15 bp, Homo sapiens
tgggggaggggtgtc

SEQ ID NO: 46506 - DNA, 15 bp, Homo sapiens
gggggaggggtgtcc

SEQ ID NO: 46507 - DNA, 15 bp, Homo sapiens
ggggaggggtgtcca

SEQ ID NO: 46508 - DNA, 15 bp, Homo sapiens
gggaggggtgtccac

SEQ ID NO: 46509 - DNA, 15 bp, Homo sapiens
ggaggggtgtccacc

SEQ ID NO: 46510 - DNA, 15 bp, Homo sapiens
gaggggtgtccacca

SEQ ID NO: 46511 - DNA, 15 bp, Homo sapiens
aggggtgtccaccat

SEQ ID NO: 46512 - DNA, 15 bp, Homo sapiens
ggggtgtccaccatt

SEQ ID NO: 46513 - DNA, 15 bp, Homo sapiens
gggtgtccaccattg

SEQ ID NO: 46514 - DNA, 15 bp, Homo sapiens
ggtgtccaccattgc

SEQ ID NO: 46515 - DNA, 15 bp, Homo sapiens
gtgtccaccattgct

SEQ ID NO: 46516 - DNA, 15 bp, Homo sapiens
tgtccaccattgctg

SEQ ID NO: 46517 - DNA, 15 bp, Homo sapiens
gtccaccattgctga

SEQ ID NO: 46518 - DNA, 15 bp, Homo sapiens
tccaccattgctgag

SEQ ID NO: 46519 - DNA, 15 bp, Homo sapiens
ccaccattgctgaga

SEQ ID NO: 46520 - DNA, 15 bp, Homo sapiens
caccattgctgagac

SEQ ID NO: 46521 - DNA, 15 bp, Homo sapiens
accattgctgagact

SEQ ID NO: 46522 - DNA, 15 bp, Homo sapiens
ccattgctgagactt

SEQ ID NO: 46523 - DNA, 15 bp, Homo sapiens
cattgctgagacttg

SEQ ID NO: 46524 - DNA, 15 bp, Homo sapiens
attgctgagacttga

SEQ ID NO: 46525 - DNA, 15 bp, Homo sapiens
ttgctgagacttgag

SEQ ID NO: 46526 - DNA, 15 bp, Homo sapiens
tgctgagacttgagt

SEQ ID NO: 46527 - DNA, 15 bp, Homo sapiens
gctgagacttgagta

SEQ ID NO: 46528 - DNA, 15 bp, Homo sapiens
ctgagacttgagtag

SEQ ID NO: 46529 - DNA, 15 bp, Homo sapiens
tgagacttgagtagg

SEQ ID NO: 46530 - DNA, 15 bp, Homo sapiens
gagacttgagtaggt

SEQ ID NO: 46531 - DNA, 15 bp, Homo sapiens
agacttgagtaggta

SEQ ID NO: 46532 - DNA, 15 bp, Homo sapiens
gacttgagtaggtaa

SEQ ID NO: 46533 - DNA, 15 bp, Homo sapiens
acttgagtaggtaaa

SEQ ID NO: 46534 - DNA, 15 bp, Homo sapiens
cttgagtaggtaaac

SEQ ID NO: 46535 - DNA, 15 bp, Homo sapiens
ttgagtaggtaaaca

SEQ ID NO: 46536 - DNA, 15 bp, Homo sapiens
tgagtaggtaaacaa

SEQ ID NO: 46537 - DNA, 15 bp, Homo sapiens
gagtaggtaaacaaa

SEQ ID NO: 46538 - DNA, 15 bp, Homo sapiens
agtaggtaaacaaag

SEQ ID NO: 46539 - DNA, 15 bp, Homo sapiens
gtaggtaaacaaagc

SEQ ID NO: 46540 - DNA, 15 bp, Homo sapiens
taggtaaacaaagca

SEQ ID NO: 46541 - DNA, 15 bp, Homo sapiens
aggtaaacaaagcag

SEQ ID NO: 46542 - DNA, 15 bp, Homo sapiens
ggtaaacaaagcagc

SEQ ID NO: 46543 - DNA, 15 bp, Homo sapiens
gtaaacaaagcagcc

SEQ ID NO: 46544 - DNA, 15 bp, Homo sapiens
taaacaaagcagcca

SEQ ID NO: 46545 - DNA, 15 bp, Homo sapiens
aaacaaagcagccag

SEQ ID NO: 46546 - DNA, 15 bp, Homo sapiens
aacaaagcagccagg

SEQ ID NO: 46547 - DNA, 15 bp, Homo sapiens
acaaagcagccagga

SEQ ID NO: 46548 - DNA, 15 bp, Homo sapiens
caaagcagccaggaa

SEQ ID NO: 46549 - DNA, 15 bp, Homo sapiens
aaagcagccaggaag

SEQ ID NO: 46550 - DNA, 15 bp, Homo sapiens
aagcagccaggaagc

SEQ ID NO: 46551 - DNA, 15 bp, Homo sapiens
agcagccaggaagct

SEQ ID NO: 46552 - DNA, 15 bp, Homo sapiens
gcagccaggaagctc

SEQ ID NO: 46553 - DNA, 15 bp, Homo sapiens
cagccaggaagctcg

SEQ ID NO: 46554 - DNA, 15 bp, Homo sapiens
agccaggaagctcga

SEQ ID NO: 46555 - DNA, 15 bp, Homo sapiens
gccaggaagctcgaa

SEQ ID NO: 46556 - DNA, 15 bp, Homo sapiens
ccaggaagctcgaaa

SEQ ID NO: 46557 - DNA, 15 bp, Homo sapiens
caggaagctcgaaat

SEQ ID NO: 46558 - DNA, 15 bp, Homo sapiens
aggaagctcgaaatg

SEQ ID NO: 46559 - DNA, 15 bp, Homo sapiens
ggaagctcgaaatgg

SEQ ID NO: 46560 - DNA, 15 bp, Homo sapiens
gaagctcgaaatggg

SEQ ID NO: 46561 - DNA, 15 bp, Homo sapiens
aagctcgaaatgggt

SEQ ID NO: 46562 - DNA, 15 bp, Homo sapiens
agctcgaaatgggtg

SEQ ID NO: 46563 - DNA, 15 bp, Homo sapiens
gctcgaaatgggtgg

SEQ ID NO: 46564 - DNA, 15 bp, Homo sapiens
ctcgaaatgggtgga

SEQ ID NO: 46565 - DNA, 15 bp, Homo sapiens
tcgaaatgggtggag

SEQ ID NO: 46566 - DNA, 15 bp, Homo sapiens
cgaaatgggtggagc

SEQ ID NO: 46567 - DNA, 15 bp, Homo sapiens
gaaatgggtggagcc

SEQ ID NO: 46568 - DNA, 15 bp, Homo sapiens
aaatgggtggagccc

SEQ ID NO: 46569 - DNA, 15 bp, Homo sapiens
aatgggtggagccca

SEQ ID NO: 46570 - DNA, 15 bp, Homo sapiens
atgggtggagcccac

SEQ ID NO: 46571 - DNA, 15 bp, Homo sapiens
tgggtggagcccacc

SEQ ID NO: 46572 - DNA, 15 bp, Homo sapiens
gggtggagcccaccg

SEQ ID NO: 46573 - DNA, 15 bp, Homo sapiens
ggtggagcccaccgc

SEQ ID NO: 46574 - DNA, 15 bp, Homo sapiens
gtggagcccaccgca

SEQ ID NO: 46575 - DNA, 15 bp, Homo sapiens
tggagcccaccgcag

SEQ ID NO: 46576 - DNA, 15 bp, Homo sapiens
ggagcccaccgcagc

SEQ ID NO: 46577 - DNA, 15 bp, Homo sapiens
gagcccaccgcagct

SEQ ID NO: 46578 - DNA, 15 bp, Homo sapiens
agcccaccgcagctc

SEQ ID NO: 46579 - DNA, 15 bp, Homo sapiens
gcccaccgcagctca

SEQ ID NO: 46580 - DNA, 15 bp, Homo sapiens
cccaccgcagctcaa

SEQ ID NO: 46581 - DNA, 15 bp, Homo sapiens
ccaccgcagctcaag

SEQ ID NO: 46582 - DNA, 15 bp, Homo sapiens
caccgcagctcaagg

SEQ ID NO: 46583 - DNA, 15 bp, Homo sapiens
accgcagctcaagga

SEQ ID NO: 46584 - DNA, 15 bp, Homo sapiens
ccgcagctcaaggag

SEQ ID NO: 46585 - DNA, 15 bp, Homo sapiens
cgcagctcaaggagg

SEQ ID NO: 46586 - DNA, 15 bp, Homo sapiens
gcagctcaaggaggc

SEQ ID NO: 46587 - DNA, 15 bp, Homo sapiens
cagctcaaggaggcc

SEQ ID NO: 46588 - DNA, 15 bp, Homo sapiens
agctcaaggaggcct

SEQ ID NO: 46589 - DNA, 15 bp, Homo sapiens
gctcaaggaggcctg

SEQ ID NO: 46590 - DNA, 15 bp, Homo sapiens
ctcaaggaggcctgc

SEQ ID NO: 46591 - DNA, 15 bp, Homo sapiens
tcaaggaggcctgcc

SEQ ID NO: 46592 - DNA, 15 bp, Homo sapiens
caaggaggcctgcct

SEQ ID NO: 46593 - DNA, 15 bp, Homo sapiens
aaggaggcctgcctg

SEQ ID NO: 46594 - DNA, 15 bp, Homo sapiens
aggaggcctgcctgc

SEQ ID NO: 46595 - DNA, 15 bp, Homo sapiens
ggaggcctgcctgcc

SEQ ID NO: 46596 - DNA, 15 bp, Homo sapiens
gaggcctgcctgcct

SEQ ID NO: 46597 - DNA, 15 bp, Homo sapiens
aggcctgcctgcctc

SEQ ID NO: 46598 - DNA, 15 bp, Homo sapiens
ggcctgcctgcctct

SEQ ID NO: 46599 - DNA, 15 bp, Homo sapiens
gcctgcctgcctctg

SEQ ID NO: 46600 - DNA, 15 bp, Homo sapiens
cctgcctgcctctgt

SEQ ID NO: 46601 - DNA, 15 bp, Homo sapiens
ctgcctgcctctgta

SEQ ID NO: 46602 - DNA, 15 bp, Homo sapiens
tgcctgcctctgtag

SEQ ID NO: 46603 - DNA, 15 bp, Homo sapiens
gcctgcctctgtaga

SEQ ID NO: 46604 - DNA, 15 bp, Homo sapiens
cctgcctctgtagac

SEQ ID NO: 46605 - DNA, 15 bp, Homo sapiens
ctgcctctgtagact

SEQ ID NO: 46606 - DNA, 15 bp, Homo sapiens
tgcctctgtagactc

SEQ ID NO: 46607 - DNA, 15 bp, Homo sapiens
gcctctgtagactcc

SEQ ID NO: 46608 - DNA, 15 bp, Homo sapiens
cctctgtagactcca

SEQ ID NO: 46609 - DNA, 15 bp, Homo sapiens
ctctgtagactccac

SEQ ID NO: 46610 - DNA, 15 bp, Homo sapiens
tctgtagactccacc

SEQ ID NO: 46611 - DNA, 15 bp, Homo sapiens
ctgtagactccacct

SEQ ID NO: 46612 - DNA, 15 bp, Homo sapiens
tgtagactccacctc

SEQ ID NO: 46613 - DNA, 15 bp, Homo sapiens
gtagactccacctct

SEQ ID NO: 46614 - DNA, 15 bp, Homo sapiens
tagactccacctcta

SEQ ID NO: 46615 - DNA, 15 bp, Homo sapiens
agactccacctctag

SEQ ID NO: 46616 - DNA, 15 bp, Homo sapiens
gactccacctctagg

SEQ ID NO: 46617 - DNA, 15 bp, Homo sapiens
actccacctctaggg

SEQ ID NO: 46618 - DNA, 15 bp, Homo sapiens
ctccacctctagggg

SEQ ID NO: 46619 - DNA, 15 bp, Homo sapiens
tccacctctaggggc

SEQ ID NO: 46620 - DNA, 15 bp, Homo sapiens
ccacctctaggggca

SEQ ID NO: 46621 - DNA, 15 bp, Homo sapiens
cacctctaggggcag

SEQ ID NO: 46622 - DNA, 15 bp, Homo sapiens
acctctaggggcagg

SEQ ID NO: 46623 - DNA, 15 bp, Homo sapiens
cctctaggggcaggg

SEQ ID NO: 46624 - DNA, 15 bp, Homo sapiens
ctctaggggcagggc

SEQ ID NO: 46625 - DNA, 15 bp, Homo sapiens
tctaggggcagggca

SEQ ID NO: 46626 - DNA, 15 bp, Homo sapiens
ctaggggcagggcac

SEQ ID NO: 46627 - DNA, 15 bp, Homo sapiens
taggggcagggcaca

SEQ ID NO: 46628 - DNA, 15 bp, Homo sapiens
aggggcagggcacag

SEQ ID NO: 46629 - DNA, 15 bp, Homo sapiens
ggggcagggcacagc

SEQ ID NO: 46630 - DNA, 15 bp, Homo sapiens
gggcagggcacagct

SEQ ID NO: 46631 - DNA, 15 bp, Homo sapiens
ggcagggcacagctg

SEQ ID NO: 46632 - DNA, 15 bp, Homo sapiens
gcagggcacagctga

SEQ ID NO: 46633 - DNA, 15 bp, Homo sapiens
cagggcacagctgaa

SEQ ID NO: 46634 - DNA, 15 bp, Homo sapiens
agggcacagctgaac

SEQ ID NO: 46635 - DNA, 15 bp, Homo sapiens
gggcacagctgaaca

SEQ ID NO: 46636 - DNA, 15 bp, Homo sapiens
ggcacagctgaacaa

SEQ ID NO: 46637 - DNA, 15 bp, Homo sapiens
gcacagctgaacaaa

SEQ ID NO: 46638 - DNA, 15 bp, Homo sapiens
cacagctgaacaaaa

SEQ ID NO: 46639 - DNA, 15 bp, Homo sapiens
acagctgaacaaaag

SEQ ID NO: 46640 - DNA, 15 bp, Homo sapiens
cagctgaacaaaaga

SEQ ID NO: 46641 - DNA, 15 bp, Homo sapiens
agctgaacaaaagac

SEQ ID NO: 46642 - DNA, 15 bp, Homo sapiens
gctgaacaaaagaca

SEQ ID NO: 46643 - DNA, 15 bp, Homo sapiens
ctgaacaaaagacag

SEQ ID NO: 46644 - DNA, 15 bp, Homo sapiens
tgaacaaaagacagc

SEQ ID NO: 46645 - DNA, 15 bp, Homo sapiens
gaacaaaagacagca

SEQ ID NO: 46646 - DNA, 15 bp, Homo sapiens
aacaaaagacagcag

SEQ ID NO: 46647 - DNA, 15 bp, Homo sapiens
acaaaagacagcaga

SEQ ID NO: 46648 - DNA, 15 bp, Homo sapiens
caaaagacagcagaa

SEQ ID NO: 46649 - DNA, 15 bp, Homo sapiens
aaaagacagcagaaa

SEQ ID NO: 46650 - DNA, 15 bp, Homo sapiens
aaagacagcagaaac

SEQ ID NO: 46651 - DNA, 15 bp, Homo sapiens
aagacagcagaaact

SEQ ID NO: 46652 - DNA, 15 bp, Homo sapiens
agacagcagaaactt

SEQ ID NO: 46653 - DNA, 15 bp, Homo sapiens
gacagcagaaacttc

SEQ ID NO: 46654 - DNA, 15 bp, Homo sapiens
acagcagaaacttct

SEQ ID NO: 46655 - DNA, 15 bp, Homo sapiens
cagcagaaacttctg

SEQ ID NO: 46656 - DNA, 15 bp, Homo sapiens
agcagaaacttctgc

SEQ ID NO: 46657 - DNA, 15 bp, Homo sapiens
gcagaaacttctgca

SEQ ID NO: 46658 - DNA, 15 bp, Homo sapiens
cagaaacttctgcag

SEQ ID NO: 46659 - DNA, 15 bp, Homo sapiens
agaaacttctgcaga

SEQ ID NO: 46660 - DNA, 15 bp, Homo sapiens
gaaacttctgcagac

SEQ ID NO: 46661 - DNA, 15 bp, Homo sapiens
aaacttctgcagact

SEQ ID NO: 46662 - DNA, 15 bp, Homo sapiens
aacttctgcagactt

SEQ ID NO: 46663 - DNA, 15 bp, Homo sapiens
acttctgcagactta

SEQ ID NO: 46664 - DNA, 15 bp, Homo sapiens
cttctgcagacttaa

SEQ ID NO: 46665 - DNA, 15 bp, Homo sapiens
ttctgcagacttaaa

SEQ ID NO: 46666 - DNA, 15 bp, Homo sapiens
tctgcagacttaaat

SEQ ID NO: 46667 - DNA, 15 bp, Homo sapiens
ctgcagacttaaatg

SEQ ID NO: 46668 - DNA, 15 bp, Homo sapiens
tgcagacttaaatgt

SEQ ID NO: 46669 - DNA, 15 bp, Homo sapiens
gcagacttaaatgtc

SEQ ID NO: 46670 - DNA, 15 bp, Homo sapiens
cagacttaaatgtcc

SEQ ID NO: 46671 - DNA, 15 bp, Homo sapiens
agacttaaatgtccc

SEQ ID NO: 46672 - DNA, 15 bp, Homo sapiens
gacttaaatgtccct

SEQ ID NO: 46673 - DNA, 15 bp, Homo sapiens
acttaaatgtccctg

SEQ ID NO: 46674 - DNA, 15 bp, Homo sapiens
cttaaatgtccctgt

SEQ ID NO: 46675 - DNA, 15 bp, Homo sapiens
ttaaatgtccctgtc

SEQ ID NO: 46676 - DNA, 15 bp, Homo sapiens
taaatgtccctgtct

SEQ ID NO: 46677 - DNA, 15 bp, Homo sapiens
aaatgtccctgtctg

SEQ ID NO: 46678 - DNA, 15 bp, Homo sapiens
aatgtccctgtctga

SEQ ID NO: 46679 - DNA, 15 bp, Homo sapiens
atgtccctgtctgac

SEQ ID NO: 46680 - DNA, 15 bp, Homo sapiens
tgtccctgtctgaca

SEQ ID NO: 46681 - DNA, 15 bp, Homo sapiens
gtccctgtctgacag

SEQ ID NO: 46682 - DNA, 15 bp, Homo sapiens
tccctgtctgacagc

SEQ ID NO: 46683 - DNA, 15 bp, Homo sapiens
ccctgtctgacagct

SEQ ID NO: 46684 - DNA, 15 bp, Homo sapiens
cctgtctgacagctt

SEQ ID NO: 46685 - DNA, 15 bp, Homo sapiens
ctgtctgacagcttt

SEQ ID NO: 46686 - DNA, 15 bp, Homo sapiens
tgtctgacagctttg

SEQ ID NO: 46687 - DNA, 15 bp, Homo sapiens
gtctgacagctttga

SEQ ID NO: 46688 - DNA, 15 bp, Homo sapiens
tctgacagctttgaa

SEQ ID NO: 46689 - DNA, 15 bp, Homo sapiens
ctgacagctttgaaa

SEQ ID NO: 46690 - DNA, 15 bp, Homo sapiens
tgacagctttgaaaa

SEQ ID NO: 46691 - DNA, 15 bp, Homo sapiens
gacagctttgaaaag

SEQ ID NO: 46692 - DNA, 15 bp, Homo sapiens
acagctttgaaaaga

SEQ ID NO: 46693 - DNA, 15 bp, Homo sapiens
cagctttgaaaagag

SEQ ID NO: 46694 - DNA, 15 bp, Homo sapiens
agctttgaaaagagt

SEQ ID NO: 46695 - DNA, 15 bp, Homo sapiens
gctttgaaaagagta

SEQ ID NO: 46696 - DNA, 15 bp, Homo sapiens
ctttgaaaagagtag

SEQ ID NO: 46697 - DNA, 15 bp, Homo sapiens
tttgaaaagagtagg

SEQ ID NO: 46698 - DNA, 15 bp, Homo sapiens
ttgaaaagagtaggg

SEQ ID NO: 46699 - DNA, 15 bp, Homo sapiens
tgaaaagagtagggg

SEQ ID NO: 46700 - DNA, 15 bp, Homo sapiens
gaaaagagtaggggt

SEQ ID NO: 46701 - DNA, 15 bp, Homo sapiens
aaaagagtaggggtc

SEQ ID NO: 46702 - DNA, 15 bp, Homo sapiens
aaagagtaggggtcc

SEQ ID NO: 46703 - DNA, 15 bp, Homo sapiens
aagagtaggggtcct

SEQ ID NO: 46704 - DNA, 15 bp, Homo sapiens
agagtaggggtcctc

SEQ ID NO: 46705 - DNA, 15 bp, Homo sapiens
gagtaggggtcctcc

SEQ ID NO: 46706 - DNA, 15 bp, Homo sapiens
agtaggggtcctccc

SEQ ID NO: 46707 - DNA, 15 bp, Homo sapiens
gtaggggtcctccca

SEQ ID NO: 46708 - DNA, 15 bp, Homo sapiens
taggggtcctcccag

SEQ ID NO: 46709 - DNA, 15 bp, Homo sapiens
aggggtcctcccagc

SEQ ID NO: 46710 - DNA, 15 bp, Homo sapiens
ggggtcctcccagca

SEQ ID NO: 46711 - DNA, 15 bp, Homo sapiens
gggtcctcccagcat

SEQ ID NO: 46712 - DNA, 15 bp, Homo sapiens
ggtcctcccagcatg

SEQ ID NO: 46713 - DNA, 15 bp, Homo sapiens
gtcctcccagcatgg

SEQ ID NO: 46714 - DNA, 15 bp, Homo sapiens
tcctcccagcatgga

SEQ ID NO: 46715 - DNA, 15 bp, Homo sapiens
cctcccagcatggaa

SEQ ID NO: 46716 - DNA, 15 bp, Homo sapiens
ctcccagcatggaat

SEQ ID NO: 46717 - DNA, 15 bp, Homo sapiens
tcccagcatggaata

SEQ ID NO: 46718 - DNA, 15 bp, Homo sapiens
cccagcatggaatat

SEQ ID NO: 46719 - DNA, 15 bp, Homo sapiens
ccagcatggaatatg

SEQ ID NO: 46720 - DNA, 15 bp, Homo sapiens
cagcatggaatatga

SEQ ID NO: 46721 - DNA, 15 bp, Homo sapiens
agcatggaatatgat

SEQ ID NO: 46722 - DNA, 15 bp, Homo sapiens
gcatggaatatgata

SEQ ID NO: 46723 - DNA, 15 bp, Homo sapiens
catggaatatgatat

SEQ ID NO: 46724 - DNA, 15 bp, Homo sapiens
atggaatatgatatc

SEQ ID NO: 46725 - DNA, 15 bp, Homo sapiens
tggaatatgatatct

SEQ ID NO: 46726 - DNA, 15 bp, Homo sapiens
ggaatatgatatctg

SEQ ID NO: 46727 - DNA, 15 bp, Homo sapiens
gaatatgatatctga

SEQ ID NO: 46728 - DNA, 15 bp, Homo sapiens
aatatgatatctgag

SEQ ID NO: 46729 - DNA, 15 bp, Homo sapiens
atatgatatctgaga

SEQ ID NO: 46730 - DNA, 15 bp, Homo sapiens
tatgatatctgagaa

SEQ ID NO: 46731 - DNA, 15 bp, Homo sapiens
atgatatctgagaat

SEQ ID NO: 46732 - DNA, 15 bp, Homo sapiens
tgatatctgagaatg

SEQ ID NO: 46733 - DNA, 15 bp, Homo sapiens
gatatctgagaatgg

SEQ ID NO: 46734 - DNA, 15 bp, Homo sapiens
atatctgagaatgga

SEQ ID NO: 46735 - DNA, 15 bp, Homo sapiens
tatctgagaatggac

SEQ ID NO: 46736 - DNA, 15 bp, Homo sapiens
atctgagaatggaca

SEQ ID NO: 46737 - DNA, 15 bp, Homo sapiens
tctgagaatggacag

SEQ ID NO: 46738 - DNA, 15 bp, Homo sapiens
ctgagaatggacagt

SEQ ID NO: 46739 - DNA, 15 bp, Homo sapiens
tgagaatggacagtc

SEQ ID NO: 46740 - DNA, 15 bp, Homo sapiens
gagaatggacagtct

SEQ ID NO: 46741 - DNA, 15 bp, Homo sapiens
agaatggacagtctg

SEQ ID NO: 46742 - DNA, 15 bp, Homo sapiens
gaatggacagtctgc

SEQ ID NO: 46743 - DNA, 15 bp, Homo sapiens
aatggacagtctgcc

SEQ ID NO: 46744 - DNA, 15 bp, Homo sapiens
atggacagtctgcct

SEQ ID NO: 46745 - DNA, 15 bp, Homo sapiens
tggacagtctgcctc

SEQ ID NO: 46746 - DNA, 15 bp, Homo sapiens
ggacagtctgcctct

SEQ ID NO: 46747 - DNA, 15 bp, Homo sapiens
gacagtctgcctctt

SEQ ID NO: 46748 - DNA, 15 bp, Homo sapiens
acagtctgcctcttc

SEQ ID NO: 46749 - DNA, 15 bp, Homo sapiens
cagtctgcctcttca

SEQ ID NO: 46750 - DNA, 15 bp, Homo sapiens
agtctgcctcttcaa

SEQ ID NO: 46751 - DNA, 15 bp, Homo sapiens
gtctgcctcttcaag

SEQ ID NO: 46752 - DNA, 15 bp, Homo sapiens
tctgcctcttcaagt

SEQ ID NO: 46753 - DNA, 15 bp, Homo sapiens
ctgcctcttcaagtg

SEQ ID NO: 46754 - DNA, 15 bp, Homo sapiens
tgcctcttcaagtgg

SEQ ID NO: 46755 - DNA, 15 bp, Homo sapiens
gcctcttcaagtggg

SEQ ID NO: 46756 - DNA, 15 bp, Homo sapiens
cctcttcaagtgggt

SEQ ID NO: 46757 - DNA, 15 bp, Homo sapiens
ctcttcaagtgggtt

SEQ ID NO: 46758 - DNA, 15 bp, Homo sapiens
tcttcaagtgggttc

SEQ ID NO: 46759 - DNA, 15 bp, Homo sapiens
cttcaagtgggttcc

SEQ ID NO: 46760 - DNA, 15 bp, Homo sapiens
ttcaagtgggttcct

SEQ ID NO: 46761 - DNA, 15 bp, Homo sapiens
tcaagtgggttcctg

SEQ ID NO: 46762 - DNA, 15 bp, Homo sapiens
caagtgggttcctga

SEQ ID NO: 46763 - DNA, 15 bp, Homo sapiens
aagtgggttcctgac

SEQ ID NO: 46764 - DNA, 15 bp, Homo sapiens
agtgggttcctgacc

SEQ ID NO: 46765 - DNA, 15 bp, Homo sapiens
gtgggttcctgaccc

SEQ ID NO: 46766 - DNA, 15 bp, Homo sapiens
tgggttcctgacccc

SEQ ID NO: 46767 - DNA, 15 bp, Homo sapiens
gggttcctgacccct

SEQ ID NO: 46768 - DNA, 15 bp, Homo sapiens
ggttcctgacccctg

SEQ ID NO: 46769 - DNA, 15 bp, Homo sapiens
gttcctgacccctga

SEQ ID NO: 46770 - DNA, 15 bp, Homo sapiens
ttcctgacccctgag

SEQ ID NO: 46771 - DNA, 15 bp, Homo sapiens
tcctgacccctgagt

SEQ ID NO: 46772 - DNA, 15 bp, Homo sapiens
cctgacccctgagta

SEQ ID NO: 46773 - DNA, 15 bp, Homo sapiens
ctgacccctgagtag

SEQ ID NO: 46774 - DNA, 15 bp, Homo sapiens
tgacccctgagtagc

SEQ ID NO: 46775 - DNA, 15 bp, Homo sapiens
gacccctgagtagcc

SEQ ID NO: 46776 - DNA, 15 bp, Homo sapiens
acccctgagtagcct

SEQ ID NO: 46777 - DNA, 15 bp, Homo sapiens
cccctgagtagccta

SEQ ID NO: 46778 - DNA, 15 bp, Homo sapiens
ccctgagtagcctaa

SEQ ID NO: 46779 - DNA, 15 bp, Homo sapiens
cctgagtagcctaac

SEQ ID NO: 46780 - DNA, 15 bp, Homo sapiens
ctgagtagcctaact

SEQ ID NO: 46781 - DNA, 15 bp, Homo sapiens
tgagtagcctaactg

SEQ ID NO: 46782 - DNA, 15 bp, Homo sapiens
gagtagcctaactgg

SEQ ID NO: 46783 - DNA, 15 bp, Homo sapiens
agtagcctaactggg

SEQ ID NO: 46784 - DNA, 15 bp, Homo sapiens
gtagcctaactggga

SEQ ID NO: 46785 - DNA, 15 bp, Homo sapiens
tagcctaactgggag

SEQ ID NO: 46786 - DNA, 15 bp, Homo sapiens
agcctaactgggagg

SEQ ID NO: 46787 - DNA, 15 bp, Homo sapiens
gcctaactgggaggc

SEQ ID NO: 46788 - DNA, 15 bp, Homo sapiens
cctaactgggaggca

SEQ ID NO: 46789 - DNA, 15 bp, Homo sapiens
ctaactgggaggcac

SEQ ID NO: 46790 - DNA, 15 bp, Homo sapiens
taactgggaggcacc

SEQ ID NO: 46791 - DNA, 15 bp, Homo sapiens
aactgggaggcacct

SEQ ID NO: 46792 - DNA, 15 bp, Homo sapiens
actgggaggcacctc

SEQ ID NO: 46793 - DNA, 15 bp, Homo sapiens
ctgggaggcacctcc

SEQ ID NO: 46794 - DNA, 15 bp, Homo sapiens
tgggaggcacctccc

SEQ ID NO: 46795 - DNA, 15 bp, Homo sapiens
gggaggcacctccca

SEQ ID NO: 46796 - DNA, 15 bp, Homo sapiens
ggaggcacctcccag

SEQ ID NO: 46797 - DNA, 15 bp, Homo sapiens
gaggcacctcccagt

SEQ ID NO: 46798 - DNA, 15 bp, Homo sapiens
aggcacctcccagta

SEQ ID NO: 46799 - DNA, 15 bp, Homo sapiens
ggcacctcccagtag

SEQ ID NO: 46800 - DNA, 15 bp, Homo sapiens
gcacctcccagtagg

SEQ ID NO: 46801 - DNA, 15 bp, Homo sapiens
cacctcccagtaggg

SEQ ID NO: 46802 - DNA, 15 bp, Homo sapiens
acctcccagtagggg

SEQ ID NO: 46803 - DNA, 15 bp, Homo sapiens
cctcccagtaggggc

SEQ ID NO: 46804 - DNA, 15 bp, Homo sapiens
ctcccagtaggggcc

SEQ ID NO: 46805 - DNA, 15 bp, Homo sapiens
tcccagtaggggccg

SEQ ID NO: 46806 - DNA, 15 bp, Homo sapiens
cccagtaggggccga

SEQ ID NO: 46807 - DNA, 15 bp, Homo sapiens
ccagtaggggccgac

SEQ ID NO: 46808 - DNA, 15 bp, Homo sapiens
cagtaggggccgact

SEQ ID NO: 46809 - DNA, 15 bp, Homo sapiens
agtaggggccgactg

SEQ ID NO: 46810 - DNA, 15 bp, Homo sapiens
gtaggggccgactga

SEQ ID NO: 46811 - DNA, 15 bp, Homo sapiens
taggggccgactgac

SEQ ID NO: 46812 - DNA, 15 bp, Homo sapiens
aggggccgactgaca

SEQ ID NO: 46813 - DNA, 15 bp, Homo sapiens
ggggccgactgacac

SEQ ID NO: 46814 - DNA, 15 bp, Homo sapiens
gggccgactgacacc

SEQ ID NO: 46815 - DNA, 15 bp, Homo sapiens
ggccgactgacacct

SEQ ID NO: 46816 - DNA, 15 bp, Homo sapiens
gccgactgacacctc

SEQ ID NO: 46817 - DNA, 15 bp, Homo sapiens
ccgactgacacctca

SEQ ID NO: 46818 - DNA, 15 bp, Homo sapiens
cgactgacacctcat

SEQ ID NO: 46819 - DNA, 15 bp, Homo sapiens
gactgacacctcata

SEQ ID NO: 46820 - DNA, 15 bp, Homo sapiens
actgacacctcatac

SEQ ID NO: 46821 - DNA, 15 bp, Homo sapiens
ctgacacctcatacg

SEQ ID NO: 46822 - DNA, 15 bp, Homo sapiens
tgacacctcatacgg

SEQ ID NO: 46823 - DNA, 15 bp, Homo sapiens
gacacctcatacggc

SEQ ID NO: 46824 - DNA, 15 bp, Homo sapiens
acacctcatacggcc

SEQ ID NO: 46825 - DNA, 15 bp, Homo sapiens
cacctcatacggcca

SEQ ID NO: 46826 - DNA, 15 bp, Homo sapiens
acctcatacggccag

SEQ ID NO: 46827 - DNA, 15 bp, Homo sapiens
cctcatacggccagg

SEQ ID NO: 46828 - DNA, 15 bp, Homo sapiens
ctcatacggccaggt

SEQ ID NO: 46829 - DNA, 15 bp, Homo sapiens
tcatacggccaggtg

SEQ ID NO: 46830 - DNA, 15 bp, Homo sapiens
catacggccaggtgc

SEQ ID NO: 46831 - DNA, 15 bp, Homo sapiens
atacggccaggtgcc

SEQ ID NO: 46832 - DNA, 15 bp, Homo sapiens
tacggccaggtgccc

SEQ ID NO: 46833 - DNA, 15 bp, Homo sapiens
acggccaggtgcccc

SEQ ID NO: 46834 - DNA, 15 bp, Homo sapiens
cggccaggtgcccct

SEQ ID NO: 46835 - DNA, 15 bp, Homo sapiens
ggccaggtgcccctc

SEQ ID NO: 46836 - DNA, 15 bp, Homo sapiens
gccaggtgcccctct

SEQ ID NO: 46837 - DNA, 15 bp, Homo sapiens
ccaggtgcccctctg

SEQ ID NO: 46838 - DNA, 15 bp, Homo sapiens
caggtgcccctctga

SEQ ID NO: 46839 - DNA, 15 bp, Homo sapiens
aggtgcccctctgag

SEQ ID NO: 46840 - DNA, 15 bp, Homo sapiens
ggtgcccctctgaga

SEQ ID NO: 46841 - DNA, 15 bp, Homo sapiens
gtgcccctctgagac

SEQ ID NO: 46842 - DNA, 15 bp, Homo sapiens
tgcccctctgagacg

SEQ ID NO: 46843 - DNA, 15 bp, Homo sapiens
gcccctctgagacga

SEQ ID NO: 46844 - DNA, 15 bp, Homo sapiens
cccctctgagacgaa

SEQ ID NO: 46845 - DNA, 15 bp, Homo sapiens
ccctctgagacgaag

SEQ ID NO: 46846 - DNA, 15 bp, Homo sapiens
cctctgagacgaagc

SEQ ID NO: 46847 - DNA, 15 bp, Homo sapiens
ctctgagacgaagct

SEQ ID NO: 46848 - DNA, 15 bp, Homo sapiens
tctgagacgaagctt

SEQ ID NO: 46849 - DNA, 15 bp, Homo sapiens
ctgagacgaagcttc

SEQ ID NO: 46850 - DNA, 15 bp, Homo sapiens
tgagacgaagcttcc

SEQ ID NO: 46851 - DNA, 15 bp, Homo sapiens
gagacgaagcttcca

SEQ ID NO: 46852 - DNA, 15 bp, Homo sapiens
agacgaagcttccag

SEQ ID NO: 46853 - DNA, 15 bp, Homo sapiens
gacgaagcttccaga

SEQ ID NO: 46854 - DNA, 15 bp, Homo sapiens
acgaagcttccagag

SEQ ID NO: 46855 - DNA, 15 bp, Homo sapiens
cgaagcttccagagg

SEQ ID NO: 46856 - DNA, 15 bp, Homo sapiens
gaagcttccagagga

SEQ ID NO: 46857 - DNA, 15 bp, Homo sapiens
aagcttccagaggaa

SEQ ID NO: 46858 - DNA, 15 bp, Homo sapiens
agcttccagaggaac

SEQ ID NO: 46859 - DNA, 15 bp, Homo sapiens
gcttccagaggaaca

SEQ ID NO: 46860 - DNA, 15 bp, Homo sapiens
cttccagaggaacaa

SEQ ID NO: 46861 - DNA, 15 bp, Homo sapiens
ttccagaggaacaat

SEQ ID NO: 46862 - DNA, 15 bp, Homo sapiens
tccagaggaacaatc

SEQ ID NO: 46863 - DNA, 15 bp, Homo sapiens
ccagaggaacaatca

SEQ ID NO: 46864 - DNA, 15 bp, Homo sapiens
cagaggaacaatcag

SEQ ID NO: 46865 - DNA, 15 bp, Homo sapiens
agaggaacaatcagg

SEQ ID NO: 46866 - DNA, 15 bp, Homo sapiens
gaggaacaatcaggg

SEQ ID NO: 46867 - DNA, 15 bp, Homo sapiens
aggaacaatcaggga

SEQ ID NO: 46868 - DNA, 15 bp, Homo sapiens
ggaacaatcagggag

SEQ ID NO: 46869 - DNA, 15 bp, Homo sapiens
gaacaatcagggagc

SEQ ID NO: 46870 - DNA, 15 bp, Homo sapiens
aacaatcagggagca

SEQ ID NO: 46871 - DNA, 15 bp, Homo sapiens
acaatcagggagcaa

SEQ ID NO: 46872 - DNA, 15 bp, Homo sapiens
caatcagggagcaac

SEQ ID NO: 46873 - DNA, 15 bp, Homo sapiens
aatcagggagcaaca

SEQ ID NO: 46874 - DNA, 15 bp, Homo sapiens
atcagggagcaacat

SEQ ID NO: 46875 - DNA, 15 bp, Homo sapiens
tcagggagcaacatt

SEQ ID NO: 46876 - DNA, 15 bp, Homo sapiens
cagggagcaacattt

SEQ ID NO: 46877 - DNA, 15 bp, Homo sapiens
agggagcaacatttg

SEQ ID NO: 46878 - DNA, 15 bp, Homo sapiens
gggagcaacatttgc

SEQ ID NO: 46879 - DNA, 15 bp, Homo sapiens
ggagcaacatttgcc

SEQ ID NO: 46880 - DNA, 15 bp, Homo sapiens
gagcaacatttgccg

SEQ ID NO: 46881 - DNA, 15 bp, Homo sapiens
agcaacatttgccgt

SEQ ID NO: 46882 - DNA, 15 bp, Homo sapiens
gcaacatttgccgtt

SEQ ID NO: 46883 - DNA, 15 bp, Homo sapiens
caacatttgccgttc

SEQ ID NO: 46884 - DNA, 15 bp, Homo sapiens
aacatttgccgttct

SEQ ID NO: 46885 - DNA, 15 bp, Homo sapiens
acatttgccgttctg

SEQ ID NO: 46886 - DNA, 15 bp, Homo sapiens
catttgccgttctgc

SEQ ID NO: 46887 - DNA, 15 bp, Homo sapiens
atttgccgttctgca

SEQ ID NO: 46888 - DNA, 15 bp, Homo sapiens
tttgccgttctgcaa

SEQ ID NO: 46889 - DNA, 15 bp, Homo sapiens
ttgccgttctgcaat

SEQ ID NO: 46890 - DNA, 15 bp, Homo sapiens
tgccgttctgcaata

SEQ ID NO: 46891 - DNA, 15 bp, Homo sapiens
gccgttctgcaatat

SEQ ID NO: 46892 - DNA, 15 bp, Homo sapiens
ccgttctgcaatatt

SEQ ID NO: 46893 - DNA, 15 bp, Homo sapiens
cgttctgcaatattt

SEQ ID NO: 46894 - DNA, 15 bp, Homo sapiens
gttctgcaatatttg

SEQ ID NO: 46895 - DNA, 15 bp, Homo sapiens
ttctgcaatatttgc

SEQ ID NO: 46896 - DNA, 15 bp, Homo sapiens
tctgcaatatttgct

SEQ ID NO: 46897 - DNA, 15 bp, Homo sapiens
ctgcaatatttgctg

SEQ ID NO: 46898 - DNA, 15 bp, Homo sapiens
tgcaatatttgctgt

SEQ ID NO: 46899 - DNA, 15 bp, Homo sapiens
gcaatatttgctgtt

SEQ ID NO: 46900 - DNA, 15 bp, Homo sapiens
caatatttgctgttc

SEQ ID NO: 46901 - DNA, 15 bp, Homo sapiens
aatatttgctgttct

SEQ ID NO: 46902 - DNA, 15 bp, Homo sapiens
atatttgctgttctg

SEQ ID NO: 46903 - DNA, 15 bp, Homo sapiens
tatttgctgttctgc

SEQ ID NO: 46904 - DNA, 15 bp, Homo sapiens
atttgctgttctgca

SEQ ID NO: 46905 - DNA, 15 bp, Homo sapiens
tttgctgttctgcag

SEQ ID NO: 46906 - DNA, 15 bp, Homo sapiens
ttgctgttctgcagc

SEQ ID NO: 46907 - DNA, 15 bp, Homo sapiens
tgctgttctgcagcc

SEQ ID NO: 46908 - DNA, 15 bp, Homo sapiens
gctgttctgcagcct

SEQ ID NO: 46909 - DNA, 15 bp, Homo sapiens
ctgttctgcagcctc

SEQ ID NO: 46910 - DNA, 15 bp, Homo sapiens
tgttctgcagcctct

SEQ ID NO: 46911 - DNA, 15 bp, Homo sapiens
gttctgcagcctctg

SEQ ID NO: 46912 - DNA, 15 bp, Homo sapiens
ttctgcagcctctgc

SEQ ID NO: 46913 - DNA, 15 bp, Homo sapiens
tctgcagcctctgct

SEQ ID NO: 46914 - DNA, 15 bp, Homo sapiens
ctgcagcctctgctg

SEQ ID NO: 46915 - DNA, 15 bp, Homo sapiens
tgcagcctctgctgg

SEQ ID NO: 46916 - DNA, 15 bp, Homo sapiens
gcagcctctgctggt

SEQ ID NO: 46917 - DNA, 15 bp, Homo sapiens
cagcctctgctggtg

SEQ ID NO: 46918 - DNA, 15 bp, Homo sapiens
agcctctgctggtga

SEQ ID NO: 46919 - DNA, 15 bp, Homo sapiens
gcctctgctggtgat

SEQ ID NO: 46920 - DNA, 15 bp, Homo sapiens
cctctgctggtgata

SEQ ID NO: 46921 - DNA, 15 bp, Homo sapiens
ctctgctggtgatac

SEQ ID NO: 46922 - DNA, 15 bp, Homo sapiens
tctgctggtgatacc

SEQ ID NO: 46923 - DNA, 15 bp, Homo sapiens
ctgctggtgataccc

SEQ ID NO: 46924 - DNA, 15 bp, Homo sapiens
tgctggtgataccca

SEQ ID NO: 46925 - DNA, 15 bp, Homo sapiens
gctggtgatacccaa

SEQ ID NO: 46926 - DNA, 15 bp, Homo sapiens
ctggtgatacccaag

SEQ ID NO: 46927 - DNA, 15 bp, Homo sapiens
tggtgatacccaagc

SEQ ID NO: 46928 - DNA, 15 bp, Homo sapiens
ggtgatacccaagca

SEQ ID NO: 46929 - DNA, 15 bp, Homo sapiens
gtgatacccaagcaa

SEQ ID NO: 46930 - DNA, 15 bp, Homo sapiens
tgatacccaagcaaa

SEQ ID NO: 46931 - DNA, 15 bp, Homo sapiens
gatacccaagcaaac

SEQ ID NO: 46932 - DNA, 15 bp, Homo sapiens
atacccaagcaaaca

SEQ ID NO: 46933 - DNA, 15 bp, Homo sapiens
tacccaagcaaacag

SEQ ID NO: 46934 - DNA, 15 bp, Homo sapiens
acccaagcaaacagg

SEQ ID NO: 46935 - DNA, 15 bp, Homo sapiens
cccaagcaaacaggg

SEQ ID NO: 46936 - DNA, 15 bp, Homo sapiens
ccaagcaaacagggt

SEQ ID NO: 46937 - DNA, 15 bp, Homo sapiens
caagcaaacagggtc

SEQ ID NO: 46938 - DNA, 15 bp, Homo sapiens
aagcaaacagggtct

SEQ ID NO: 46939 - DNA, 15 bp, Homo sapiens
agcaaacagggtctg

SEQ ID NO: 46940 - DNA, 15 bp, Homo sapiens
gcaaacagggtctgg

SEQ ID NO: 46941 - DNA, 15 bp, Homo sapiens
caaacagggtctgga

SEQ ID NO: 46942 - DNA, 15 bp, Homo sapiens
aaacagggtctggag

SEQ ID NO: 46943 - DNA, 15 bp, Homo sapiens
aacagggtctggagt

SEQ ID NO: 46944 - DNA, 15 bp, Homo sapiens
acagggtctggagtg

SEQ ID NO: 46945 - DNA, 15 bp, Homo sapiens
cagggtctggagtgg

SEQ ID NO: 46946 - DNA, 15 bp, Homo sapiens
agggtctggagtgga

SEQ ID NO: 46947 - DNA, 15 bp, Homo sapiens
gggtctggagtggac

SEQ ID NO: 46948 - DNA, 15 bp, Homo sapiens
ggtctggagtggacc

SEQ ID NO: 46949 - DNA, 15 bp, Homo sapiens
gtctggagtggacct

SEQ ID NO: 46950 - DNA, 15 bp, Homo sapiens
tctggagtggacctc

SEQ ID NO: 46951 - DNA, 15 bp, Homo sapiens
ctggagtggacctcc

SEQ ID NO: 46952 - DNA, 15 bp, Homo sapiens
tggagtggacctcca

SEQ ID NO: 46953 - DNA, 15 bp, Homo sapiens
ggagtggacctccag

SEQ ID NO: 46954 - DNA, 15 bp, Homo sapiens
gagtggacctccagc

SEQ ID NO: 46955 - DNA, 15 bp, Homo sapiens
agtggacctccagca

SEQ ID NO: 46956 - DNA, 15 bp, Homo sapiens
gtggacctccagcaa

SEQ ID NO: 46957 - DNA, 15 bp, Homo sapiens
tggacctccagcaaa

SEQ ID NO: 46958 - DNA, 15 bp, Homo sapiens
ggacctccagcaaac

SEQ ID NO: 46959 - DNA, 15 bp, Homo sapiens
gacctccagcaaact

SEQ ID NO: 46960 - DNA, 15 bp, Homo sapiens
acctccagcaaactc

SEQ ID NO: 46961 - DNA, 15 bp, Homo sapiens
cctccagcaaactcc

SEQ ID NO: 46962 - DNA, 15 bp, Homo sapiens
ctccagcaaactcca

SEQ ID NO: 46963 - DNA, 15 bp, Homo sapiens
tccagcaaactccaa

SEQ ID NO: 46964 - DNA, 15 bp, Homo sapiens
ccagcaaactccaac

SEQ ID NO: 46965 - DNA, 15 bp, Homo sapiens
cagcaaactccaaca

SEQ ID NO: 46966 - DNA, 15 bp, Homo sapiens
agcaaactccaacag

SEQ ID NO: 46967 - DNA, 15 bp, Homo sapiens
gcaaactccaacaga

SEQ ID NO: 46968 - DNA, 15 bp, Homo sapiens
caaactccaacagac

SEQ ID NO: 46969 - DNA, 15 bp, Homo sapiens
aaactccaacagacc

SEQ ID NO: 46970 - DNA, 15 bp, Homo sapiens
aactccaacagacct

SEQ ID NO: 46971 - DNA, 15 bp, Homo sapiens
actccaacagacctg

SEQ ID NO: 46972 - DNA, 15 bp, Homo sapiens
ctccaacagacctgc

SEQ ID NO: 46973 - DNA, 15 bp, Homo sapiens
tccaacagacctgca

SEQ ID NO: 46974 - DNA, 15 bp, Homo sapiens
ccaacagacctgcag

SEQ ID NO: 46975 - DNA, 15 bp, Homo sapiens
caacagacctgcagc

SEQ ID NO: 46976 - DNA, 15 bp, Homo sapiens
aacagacctgcagct

SEQ ID NO: 46977 - DNA, 15 bp, Homo sapiens
acagacctgcagctg

SEQ ID NO: 46978 - DNA, 15 bp, Homo sapiens
cagacctgcagctga

SEQ ID NO: 46979 - DNA, 15 bp, Homo sapiens
agacctgcagctgag

SEQ ID NO: 46980 - DNA, 15 bp, Homo sapiens
gacctgcagctgagg

SEQ ID NO: 46981 - DNA, 15 bp, Homo sapiens
acctgcagctgaggg

SEQ ID NO: 46982 - DNA, 15 bp, Homo sapiens
cctgcagctgagggt

SEQ ID NO: 46983 - DNA, 15 bp, Homo sapiens
ctgcagctgagggtc

SEQ ID NO: 46984 - DNA, 15 bp, Homo sapiens
tgcagctgagggtcc

SEQ ID NO: 46985 - DNA, 15 bp, Homo sapiens
gcagctgagggtcct

SEQ ID NO: 46986 - DNA, 15 bp, Homo sapiens
cagctgagggtcctg

SEQ ID NO: 46987 - DNA, 15 bp, Homo sapiens
agctgagggtcctga

SEQ ID NO: 46988 - DNA, 15 bp, Homo sapiens
gctgagggtcctgac

SEQ ID NO: 46989 - DNA, 15 bp, Homo sapiens
ctgagggtcctgact

SEQ ID NO: 46990 - DNA, 15 bp, Homo sapiens
tgagggtcctgactg

SEQ ID NO: 46991 - DNA, 15 bp, Homo sapiens
gagggtcctgactgt

SEQ ID NO: 46992 - DNA, 15 bp, Homo sapiens
agggtcctgactgtt

SEQ ID NO: 46993 - DNA, 15 bp, Homo sapiens
gggtcctgactgtta

SEQ ID NO: 46994 - DNA, 15 bp, Homo sapiens
ggtcctgactgttag

SEQ ID NO: 46995 - DNA, 15 bp, Homo sapiens
gtcctgactgttaga

SEQ ID NO: 46996 - DNA, 15 bp, Homo sapiens
tcctgactgttagaa

SEQ ID NO: 46997 - DNA, 15 bp, Homo sapiens
cctgactgttagaag

SEQ ID NO: 46998 - DNA, 15 bp, Homo sapiens
ctgactgttagaagg

SEQ ID NO: 46999 - DNA, 15 bp, Homo sapiens
tgactgttagaagga

SEQ ID NO: 47000 - DNA, 15 bp, Homo sapiens
gactgttagaaggaa

SEQ ID NO: 47001 - DNA, 15 bp, Homo sapiens
actgttagaaggaaa

SEQ ID NO: 47002 - DNA, 15 bp, Homo sapiens
ctgttagaaggaaaa

SEQ ID NO: 47003 - DNA, 15 bp, Homo sapiens
tgttagaaggaaaac

SEQ ID NO: 47004 - DNA, 15 bp, Homo sapiens
gttagaaggaaaact

SEQ ID NO: 47005 - DNA, 15 bp, Homo sapiens
ttagaaggaaaacta

SEQ ID NO: 47006 - DNA, 15 bp, Homo sapiens
tagaaggaaaactaa

SEQ ID NO: 47007 - DNA, 15 bp, Homo sapiens
agaaggaaaactaac

SEQ ID NO: 47008 - DNA, 15 bp, Homo sapiens
gaaggaaaactaaca

SEQ ID NO: 47009 - DNA, 15 bp, Homo sapiens
aaggaaaactaacaa

SEQ ID NO: 47010 - DNA, 15 bp, Homo sapiens
aggaaaactaacaaa

SEQ ID NO: 47011 - DNA, 15 bp, Homo sapiens
ggaaaactaacaaag

SEQ ID NO: 47012 - DNA, 15 bp, Homo sapiens
gaaaactaacaaaga

SEQ ID NO: 47013 - DNA, 15 bp, Homo sapiens
aaaactaacaaagag

SEQ ID NO: 47014 - DNA, 15 bp, Homo sapiens
aaactaacaaagaga

SEQ ID NO: 47015 - DNA, 15 bp, Homo sapiens
aactaacaaagagaa

SEQ ID NO: 47016 - DNA, 15 bp, Homo sapiens
actaacaaagagaaa

SEQ ID NO: 47017 - DNA, 15 bp, Homo sapiens
ctaacaaagagaaag

SEQ ID NO: 47018 - DNA, 15 bp, Homo sapiens
taacaaagagaaaga

SEQ ID NO: 47019 - DNA, 15 bp, Homo sapiens
aacaaagagaaagaa

SEQ ID NO: 47020 - DNA, 15 bp, Homo sapiens
acaaagagaaagaac

SEQ ID NO: 47021 - DNA, 15 bp, Homo sapiens
caaagagaaagaaca

SEQ ID NO: 47022 - DNA, 15 bp, Homo sapiens
aaagagaaagaacat

SEQ ID NO: 47023 - DNA, 15 bp, Homo sapiens
aagagaaagaacatc

SEQ ID NO: 47024 - DNA, 15 bp, Homo sapiens
agagaaagaacatcc

SEQ ID NO: 47025 - DNA, 15 bp, Homo sapiens
gagaaagaacatcca

SEQ ID NO: 47026 - DNA, 15 bp, Homo sapiens
agaaagaacatccac

SEQ ID NO: 47027 - DNA, 15 bp, Homo sapiens
gaaagaacatccaca

SEQ ID NO: 47028 - DNA, 15 bp, Homo sapiens
aaagaacatccacac

SEQ ID NO: 47029 - DNA, 15 bp, Homo sapiens
aagaacatccacacc

SEQ ID NO: 47030 - DNA, 15 bp, Homo sapiens
agaacatccacacca

SEQ ID NO: 47031 - DNA, 15 bp, Homo sapiens
gaacatccacaccaa

SEQ ID NO: 47032 - DNA, 15 bp, Homo sapiens
aacatccacaccaaa

SEQ ID NO: 47033 - DNA, 15 bp, Homo sapiens
acatccacaccaaaa

SEQ ID NO: 47034 - DNA, 15 bp, Homo sapiens
catccacaccaaaac

SEQ ID NO: 47035 - DNA, 15 bp, Homo sapiens
atccacaccaaaacc

SEQ ID NO: 47036 - DNA, 15 bp, Homo sapiens
tccacaccaaaaccc

SEQ ID NO: 47037 - DNA, 15 bp, Homo sapiens
ccacaccaaaacccc

SEQ ID NO: 47038 - DNA, 15 bp, Homo sapiens
cacaccaaaacccca

SEQ ID NO: 47039 - DNA, 15 bp, Homo sapiens
acaccaaaaccccat

SEQ ID NO: 47040 - DNA, 15 bp, Homo sapiens
caccaaaaccccatc

SEQ ID NO: 47041 - DNA, 15 bp, Homo sapiens
accaaaaccccatct

SEQ ID NO: 47042 - DNA, 15 bp, Homo sapiens
ccaaaaccccatctg

SEQ ID NO: 47043 - DNA, 15 bp, Homo sapiens
caaaaccccatctgt

SEQ ID NO: 47044 - DNA, 15 bp, Homo sapiens
aaaaccccatctgta

SEQ ID NO: 47045 - DNA, 15 bp, Homo sapiens
aaaccccatctgtac

SEQ ID NO: 47046 - DNA, 15 bp, Homo sapiens
aaccccatctgtacg

SEQ ID NO: 47047 - DNA, 15 bp, Homo sapiens
accccatctgtacgt

SEQ ID NO: 47048 - DNA, 15 bp, Homo sapiens
ccccatctgtacgtc

SEQ ID NO: 47049 - DNA, 15 bp, Homo sapiens
cccatctgtacgtca

SEQ ID NO: 47050 - DNA, 15 bp, Homo sapiens
ccatctgtacgtcac

SEQ ID NO: 47051 - DNA, 15 bp, Homo sapiens
catctgtacgtcacc

SEQ ID NO: 47052 - DNA, 15 bp, Homo sapiens
atctgtacgtcacca

SEQ ID NO: 47053 - DNA, 15 bp, Homo sapiens
tctgtacgtcaccat

SEQ ID NO: 47054 - DNA, 15 bp, Homo sapiens
ctgtacgtcaccatc

SEQ ID NO: 47055 - DNA, 15 bp, Homo sapiens
tgtacgtcaccatca

SEQ ID NO: 47056 - DNA, 15 bp, Homo sapiens
gtacgtcaccatcat

SEQ ID NO: 47057 - DNA, 15 bp, Homo sapiens
tacgtcaccatcatc

SEQ ID NO: 47058 - DNA, 15 bp, Homo sapiens
acgtcaccatcatca

SEQ ID NO: 47059 - DNA, 15 bp, Homo sapiens
cgtcaccatcatcaa

SEQ ID NO: 47060 - DNA, 15 bp, Homo sapiens
gtcaccatcatcaaa

SEQ ID NO: 47061 - DNA, 15 bp, Homo sapiens
tcaccatcatcaaag

SEQ ID NO: 47062 - DNA, 15 bp, Homo sapiens
caccatcatcaaaga

SEQ ID NO: 47063 - DNA, 15 bp, Homo sapiens
accatcatcaaagac

SEQ ID NO: 47064 - DNA, 15 bp, Homo sapiens
ccatcatcaaagacc

SEQ ID NO: 47065 - DNA, 15 bp, Homo sapiens
catcatcaaagacca

SEQ ID NO: 47066 - DNA, 15 bp, Homo sapiens
atcatcaaagaccaa

SEQ ID NO: 47067 - DNA, 15 bp, Homo sapiens
tcatcaaagaccaaa

SEQ ID NO: 47068 - DNA, 15 bp, Homo sapiens
catcaaagaccaaag

SEQ ID NO: 47069 - DNA, 15 bp, Homo sapiens
atcaaagaccaaagg

SEQ ID NO: 47070 - DNA, 15 bp, Homo sapiens
tcaaagaccaaaggt

SEQ ID NO: 47071 - DNA, 15 bp, Homo sapiens
caaagaccaaaggta

SEQ ID NO: 47072 - DNA, 15 bp, Homo sapiens
aaagaccaaaggtag

SEQ ID NO: 47073 - DNA, 15 bp, Homo sapiens
aagaccaaaggtaga

SEQ ID NO: 47074 - DNA, 15 bp, Homo sapiens
agaccaaaggtagat

SEQ ID NO: 47075 - DNA, 15 bp, Homo sapiens
gaccaaaggtagata

SEQ ID NO: 47076 - DNA, 15 bp, Homo sapiens
accaaaggtagataa

SEQ ID NO: 47077 - DNA, 15 bp, Homo sapiens
ccaaaggtagataaa

SEQ ID NO: 47078 - DNA, 15 bp, Homo sapiens
caaaggtagataaaa

SEQ ID NO: 47079 - DNA, 15 bp, Homo sapiens
aaaggtagataaaac

SEQ ID NO: 47080 - DNA, 15 bp, Homo sapiens
aaggtagataaaacc

SEQ ID NO: 47081 - DNA, 15 bp, Homo sapiens
aggtagataaaacca

SEQ ID NO: 47082 - DNA, 15 bp, Homo sapiens
ggtagataaaaccaa

SEQ ID NO: 47083 - DNA, 15 bp, Homo sapiens
gtagataaaaccaat

SEQ ID NO: 47084 - DNA, 15 bp, Homo sapiens
tagataaaaccaata

SEQ ID NO: 47085 - DNA, 15 bp, Homo sapiens
agataaaaccaataa

SEQ ID NO: 47086 - DNA, 15 bp, Homo sapiens
gataaaaccaataag

SEQ ID NO: 47087 - DNA, 15 bp, Homo sapiens
ataaaaccaataaga

SEQ ID NO: 47088 - DNA, 15 bp, Homo sapiens
taaaaccaataagat

SEQ ID NO: 47089 - DNA, 15 bp, Homo sapiens
aaaaccaataagatg

SEQ ID NO: 47090 - DNA, 15 bp, Homo sapiens
aaaccaataagatgg

SEQ ID NO: 47091 - DNA, 15 bp, Homo sapiens
aaccaataagatggg

SEQ ID NO: 47092 - DNA, 15 bp, Homo sapiens
accaataagatgggg

SEQ ID NO: 47093 - DNA, 15 bp, Homo sapiens
ccaataagatgggga

SEQ ID NO: 47094 - DNA, 15 bp, Homo sapiens
caataagatggggag

SEQ ID NO: 47095 - DNA, 15 bp, Homo sapiens
aataagatggggaga

SEQ ID NO: 47096 - DNA, 15 bp, Homo sapiens
ataagatggggagaa

SEQ ID NO: 47097 - DNA, 15 bp, Homo sapiens
taagatggggagaaa

SEQ ID NO: 47098 - DNA, 15 bp, Homo sapiens
aagatggggagaaac

SEQ ID NO: 47099 - DNA, 15 bp, Homo sapiens
agatggggagaaacc

SEQ ID NO: 47100 - DNA, 15 bp, Homo sapiens
gatggggagaaacca

SEQ ID NO: 47101 - DNA, 15 bp, Homo sapiens
atggggagaaaccag

SEQ ID NO: 47102 - DNA, 15 bp, Homo sapiens
tggggagaaaccaga

SEQ ID NO: 47103 - DNA, 15 bp, Homo sapiens
ggggagaaaccagag

SEQ ID NO: 47104 - DNA, 15 bp, Homo sapiens
gggagaaaccagagc

SEQ ID NO: 47105 - DNA, 15 bp, Homo sapiens
ggagaaaccagagca

SEQ ID NO: 47106 - DNA, 15 bp, Homo sapiens
gagaaaccagagcag

SEQ ID NO: 47107 - DNA, 15 bp, Homo sapiens
agaaaccagagcaga

SEQ ID NO: 47108 - DNA, 15 bp, Homo sapiens
gaaaccagagcagag

SEQ ID NO: 47109 - DNA, 15 bp, Homo sapiens
aaaccagagcagaga

SEQ ID NO: 47110 - DNA, 15 bp, Homo sapiens
aaccagagcagagaa

SEQ ID NO: 47111 - DNA, 15 bp, Homo sapiens
accagagcagagaag

SEQ ID NO: 47112 - DNA, 15 bp, Homo sapiens
ccagagcagagaagc

SEQ ID NO: 47113 - DNA, 15 bp, Homo sapiens
cagagcagagaagct

SEQ ID NO: 47114 - DNA, 15 bp, Homo sapiens
agagcagagaagctg

SEQ ID NO: 47115 - DNA, 15 bp, Homo sapiens
gagcagagaagctga

SEQ ID NO: 47116 - DNA, 15 bp, Homo sapiens
agcagagaagctgaa

SEQ ID NO: 47117 - DNA, 15 bp, Homo sapiens
gcagagaagctgaaa

SEQ ID NO: 47118 - DNA, 15 bp, Homo sapiens
cagagaagctgaaaa

SEQ ID NO: 47119 - DNA, 15 bp, Homo sapiens
agagaagctgaaaat

SEQ ID NO: 47120 - DNA, 15 bp, Homo sapiens
gagaagctgaaaatt

SEQ ID NO: 47121 - DNA, 15 bp, Homo sapiens
agaagctgaaaattc

SEQ ID NO: 47122 - DNA, 15 bp, Homo sapiens
gaagctgaaaattct

SEQ ID NO: 47123 - DNA, 15 bp, Homo sapiens
aagctgaaaattcta

SEQ ID NO: 47124 - DNA, 15 bp, Homo sapiens
agctgaaaattctaa

SEQ ID NO: 47125 - DNA, 15 bp, Homo sapiens
gctgaaaattctaaa

SEQ ID NO: 47126 - DNA, 15 bp, Homo sapiens
ctgaaaattctaaaa

SEQ ID NO: 47127 - DNA, 15 bp, Homo sapiens
tgaaaattctaaaaa

SEQ ID NO: 47128 - DNA, 15 bp, Homo sapiens
gaaaattctaaaaat

SEQ ID NO: 47129 - DNA, 15 bp, Homo sapiens
aaaattctaaaaatc

SEQ ID NO: 47130 - DNA, 15 bp, Homo sapiens
aaattctaaaaatca

SEQ ID NO: 47131 - DNA, 15 bp, Homo sapiens
aattctaaaaatcag

SEQ ID NO: 47132 - DNA, 15 bp, Homo sapiens
attctaaaaatcaga

SEQ ID NO: 47133 - DNA, 15 bp, Homo sapiens
ttctaaaaatcagag

SEQ ID NO: 47134 - DNA, 15 bp, Homo sapiens
tctaaaaatcagagc

SEQ ID NO: 47135 - DNA, 15 bp, Homo sapiens
ctaaaaatcagagca

SEQ ID NO: 47136 - DNA, 15 bp, Homo sapiens
taaaaatcagagcac

SEQ ID NO: 47137 - DNA, 15 bp, Homo sapiens
aaaaatcagagcacg

SEQ ID NO: 47138 - DNA, 15 bp, Homo sapiens
aaaatcagagcacgt

SEQ ID NO: 47139 - DNA, 15 bp, Homo sapiens
aaatcagagcacgtc

SEQ ID NO: 47140 - DNA, 15 bp, Homo sapiens
aatcagagcacgtct

SEQ ID NO: 47141 - DNA, 15 bp, Homo sapiens
atcagagcacgtctt

SEQ ID NO: 47142 - DNA, 15 bp, Homo sapiens
tcagagcacgtcttc

SEQ ID NO: 47143 - DNA, 15 bp, Homo sapiens
cagagcacgtcttct

SEQ ID NO: 47144 - DNA, 15 bp, Homo sapiens
agagcacgtcttctc

SEQ ID NO: 47145 - DNA, 15 bp, Homo sapiens
gagcacgtcttctcc

SEQ ID NO: 47146 - DNA, 15 bp, Homo sapiens
agcacgtcttctcct

SEQ ID NO: 47147 - DNA, 15 bp, Homo sapiens
gcacgtcttctcctc

SEQ ID NO: 47148 - DNA, 15 bp, Homo sapiens
cacgtcttctcctcc

SEQ ID NO: 47149 - DNA, 15 bp, Homo sapiens
acgtcttctcctcca

SEQ ID NO: 47150 - DNA, 15 bp, Homo sapiens
cgtcttctcctccaa

SEQ ID NO: 47151 - DNA, 15 bp, Homo sapiens
gtcttctcctccaaa

SEQ ID NO: 47152 - DNA, 15 bp, Homo sapiens
tcttctcctccaaag

SEQ ID NO: 47153 - DNA, 15 bp, Homo sapiens
cttctcctccaaagg

SEQ ID NO: 47154 - DNA, 15 bp, Homo sapiens
ttctcctccaaagga

SEQ ID NO: 47155 - DNA, 15 bp, Homo sapiens
tctcctccaaaggaa

SEQ ID NO: 47156 - DNA, 15 bp, Homo sapiens
ctcctccaaaggaat

SEQ ID NO: 47157 - DNA, 15 bp, Homo sapiens
tcctccaaaggaatg

SEQ ID NO: 47158 - DNA, 15 bp, Homo sapiens
cctccaaaggaatgc

SEQ ID NO: 47159 - DNA, 15 bp, Homo sapiens
ctccaaaggaatgca

SEQ ID NO: 47160 - DNA, 15 bp, Homo sapiens
tccaaaggaatgcag

SEQ ID NO: 47161 - DNA, 15 bp, Homo sapiens
ccaaaggaatgcagc

SEQ ID NO: 47162 - DNA, 15 bp, Homo sapiens
caaaggaatgcagct

SEQ ID NO: 47163 - DNA, 15 bp, Homo sapiens
aaaggaatgcagctc

SEQ ID NO: 47164 - DNA, 15 bp, Homo sapiens
aaggaatgcagctcc

SEQ ID NO: 47165 - DNA, 15 bp, Homo sapiens
aggaatgcagctcct

SEQ ID NO: 47166 - DNA, 15 bp, Homo sapiens
ggaatgcagctcctc

SEQ ID NO: 47167 - DNA, 15 bp, Homo sapiens
gaatgcagctcctcg

SEQ ID NO: 47168 - DNA, 15 bp, Homo sapiens
aatgcagctcctcgc

SEQ ID NO: 47169 - DNA, 15 bp, Homo sapiens
atgcagctcctcgcc

SEQ ID NO: 47170 - DNA, 15 bp, Homo sapiens
tgcagctcctcgcca

SEQ ID NO: 47171 - DNA, 15 bp, Homo sapiens
gcagctcctcgccag

SEQ ID NO: 47172 - DNA, 15 bp, Homo sapiens
cagctcctcgccagc

SEQ ID NO: 47173 - DNA, 15 bp, Homo sapiens
agctcctcgccagca

SEQ ID NO: 47174 - DNA, 15 bp, Homo sapiens
gctcctcgccagcaa

SEQ ID NO: 47175 - DNA, 15 bp, Homo sapiens
ctcctcgccagcaat

SEQ ID NO: 47176 - DNA, 15 bp, Homo sapiens
tcctcgccagcaatg

SEQ ID NO: 47177 - DNA, 15 bp, Homo sapiens
cctcgccagcaatgg

SEQ ID NO: 47178 - DNA, 15 bp, Homo sapiens
ctcgccagcaatgga

SEQ ID NO: 47179 - DNA, 15 bp, Homo sapiens
tcgccagcaatggaa

SEQ ID NO: 47180 - DNA, 15 bp, Homo sapiens
cgccagcaatggaac

SEQ ID NO: 47181 - DNA, 15 bp, Homo sapiens
gccagcaatggaaca

SEQ ID NO: 47182 - DNA, 15 bp, Homo sapiens
ccagcaatggaacaa

SEQ ID NO: 47183 - DNA, 15 bp, Homo sapiens
cagcaatggaacaaa

SEQ ID NO: 47184 - DNA, 15 bp, Homo sapiens
agcaatggaacaaag

SEQ ID NO: 47185 - DNA, 15 bp, Homo sapiens
gcaatggaacaaagc

SEQ ID NO: 47186 - DNA, 15 bp, Homo sapiens
caatggaacaaagct

SEQ ID NO: 47187 - DNA, 15 bp, Homo sapiens
aatggaacaaagctg

SEQ ID NO: 47188 - DNA, 15 bp, Homo sapiens
atggaacaaagctgg

SEQ ID NO: 47189 - DNA, 15 bp, Homo sapiens
tggaacaaagctgga

SEQ ID NO: 47190 - DNA, 15 bp, Homo sapiens
ggaacaaagctggac

SEQ ID NO: 47191 - DNA, 15 bp, Homo sapiens
gaacaaagctggaca

SEQ ID NO: 47192 - DNA, 15 bp, Homo sapiens
aacaaagctggacag

SEQ ID NO: 47193 - DNA, 15 bp, Homo sapiens
acaaagctggacaga

SEQ ID NO: 47194 - DNA, 15 bp, Homo sapiens
caaagctggacagag

SEQ ID NO: 47195 - DNA, 15 bp, Homo sapiens
aaagctggacagaga

SEQ ID NO: 47196 - DNA, 15 bp, Homo sapiens
aagctggacagagaa

SEQ ID NO: 47197 - DNA, 15 bp, Homo sapiens
agctggacagagaat

SEQ ID NO: 47198 - DNA, 15 bp, Homo sapiens
gctggacagagaatg

SEQ ID NO: 47199 - DNA, 15 bp, Homo sapiens
ctggacagagaatga

SEQ ID NO: 47200 - DNA, 15 bp, Homo sapiens
tggacagagaatgac

SEQ ID NO: 47201 - DNA, 15 bp, Homo sapiens
ggacagagaatgact

SEQ ID NO: 47202 - DNA, 15 bp, Homo sapiens
gacagagaatgactt

SEQ ID NO: 47203 - DNA, 15 bp, Homo sapiens
acagagaatgacttt

SEQ ID NO: 47204 - DNA, 15 bp, Homo sapiens
cagagaatgactttc

SEQ ID NO: 47205 - DNA, 15 bp, Homo sapiens
agagaatgactttca

SEQ ID NO: 47206 - DNA, 15 bp, Homo sapiens
gagaatgactttcac

SEQ ID NO: 47207 - DNA, 15 bp, Homo sapiens
agaatgactttcaca

SEQ ID NO: 47208 - DNA, 15 bp, Homo sapiens
gaatgactttcacaa

SEQ ID NO: 47209 - DNA, 15 bp, Homo sapiens
aatgactttcacaag

SEQ ID NO: 47210 - DNA, 15 bp, Homo sapiens
atgactttcacaagt

SEQ ID NO: 47211 - DNA, 15 bp, Homo sapiens
tgactttcacaagtt

SEQ ID NO: 47212 - DNA, 15 bp, Homo sapiens
gactttcacaagttg

SEQ ID NO: 47213 - DNA, 15 bp, Homo sapiens
actttcacaagttga

SEQ ID NO: 47214 - DNA, 15 bp, Homo sapiens
ctttcacaagttgag

SEQ ID NO: 47215 - DNA, 15 bp, Homo sapiens
tttcacaagttgaga

SEQ ID NO: 47216 - DNA, 15 bp, Homo sapiens
ttcacaagttgagag

SEQ ID NO: 47217 - DNA, 15 bp, Homo sapiens
tcacaagttgagaga

SEQ ID NO: 47218 - DNA, 15 bp, Homo sapiens
cacaagttgagagaa

SEQ ID NO: 47219 - DNA, 15 bp, Homo sapiens
acaagttgagagaag

SEQ ID NO: 47220 - DNA, 15 bp, Homo sapiens
caagttgagagaaga

SEQ ID NO: 47221 - DNA, 15 bp, Homo sapiens
aagttgagagaagaa

SEQ ID NO: 47222 - DNA, 15 bp, Homo sapiens
agttgagagaagaag

SEQ ID NO: 47223 - DNA, 15 bp, Homo sapiens
gttgagagaagaagg

SEQ ID NO: 47224 - DNA, 15 bp, Homo sapiens
ttgagagaagaaggc

SEQ ID NO: 47225 - DNA, 15 bp, Homo sapiens
tgagagaagaaggct

SEQ ID NO: 47226 - DNA, 15 bp, Homo sapiens
gagagaagaaggctt

SEQ ID NO: 47227 - DNA, 15 bp, Homo sapiens
agagaagaaggcttc

SEQ ID NO: 47228 - DNA, 15 bp, Homo sapiens
gagaagaaggcttca

SEQ ID NO: 47229 - DNA, 15 bp, Homo sapiens
agaagaaggcttcag

SEQ ID NO: 47230 - DNA, 15 bp, Homo sapiens
gaagaaggcttcaga

SEQ ID NO: 47231 - DNA, 15 bp, Homo sapiens
aagaaggcttcagat

SEQ ID NO: 47232 - DNA, 15 bp, Homo sapiens
agaaggcttcagatg

SEQ ID NO: 47233 - DNA, 15 bp, Homo sapiens
gaaggcttcagatga

SEQ ID NO: 47234 - DNA, 15 bp, Homo sapiens
aaggcttcagatgat

SEQ ID NO: 47235 - DNA, 15 bp, Homo sapiens
aggcttcagatgatc

SEQ ID NO: 47236 - DNA, 15 bp, Homo sapiens
ggcttcagatgatca

SEQ ID NO: 47237 - DNA, 15 bp, Homo sapiens
gcttcagatgatcag

SEQ ID NO: 47238 - DNA, 15 bp, Homo sapiens
cttcagatgatcagt

SEQ ID NO: 47239 - DNA, 15 bp, Homo sapiens
ttcagatgatcagta

SEQ ID NO: 47240 - DNA, 15 bp, Homo sapiens
tcagatgatcagtaa

SEQ ID NO: 47241 - DNA, 15 bp, Homo sapiens
cagatgatcagtaat

SEQ ID NO: 47242 - DNA, 15 bp, Homo sapiens
agatgatcagtaata

SEQ ID NO: 47243 - DNA, 15 bp, Homo sapiens
gatgatcagtaataa

SEQ ID NO: 47244 - DNA, 15 bp, Homo sapiens
atgatcagtaataac

SEQ ID NO: 47245 - DNA, 15 bp, Homo sapiens
tgatcagtaataaca

SEQ ID NO: 47246 - DNA, 15 bp, Homo sapiens
gatcagtaataacaa

SEQ ID NO: 47247 - DNA, 15 bp, Homo sapiens
atcagtaataacaaa

SEQ ID NO: 47248 - DNA, 15 bp, Homo sapiens
tcagtaataacaaac

SEQ ID NO: 47249 - DNA, 15 bp, Homo sapiens
cagtaataacaaact

SEQ ID NO: 47250 - DNA, 15 bp, Homo sapiens
agtaataacaaactc

SEQ ID NO: 47251 - DNA, 15 bp, Homo sapiens
gtaataacaaactcc

SEQ ID NO: 47252 - DNA, 15 bp, Homo sapiens
taataacaaactcct

SEQ ID NO: 47253 - DNA, 15 bp, Homo sapiens
aataacaaactcctc

SEQ ID NO: 47254 - DNA, 15 bp, Homo sapiens
ataacaaactcctcc

SEQ ID NO: 47255 - DNA, 15 bp, Homo sapiens
taacaaactcctccg

SEQ ID NO: 47256 - DNA, 15 bp, Homo sapiens
aacaaactcctccga

SEQ ID NO: 47257 - DNA, 15 bp, Homo sapiens
acaaactcctccgag

SEQ ID NO: 47258 - DNA, 15 bp, Homo sapiens
caaactcctccgagc

SEQ ID NO: 47259 - DNA, 15 bp, Homo sapiens
aaactcctccgagct

SEQ ID NO: 47260 - DNA, 15 bp, Homo sapiens
aactcctccgagcta

SEQ ID NO: 47261 - DNA, 15 bp, Homo sapiens
actcctccgagctaa

SEQ ID NO: 47262 - DNA, 15 bp, Homo sapiens
ctcctccgagctaaa

SEQ ID NO: 47263 - DNA, 15 bp, Homo sapiens
tcctccgagctaaag

SEQ ID NO: 47264 - DNA, 15 bp, Homo sapiens
cctccgagctaaagg

SEQ ID NO: 47265 - DNA, 15 bp, Homo sapiens
ctccgagctaaagga

SEQ ID NO: 47266 - DNA, 15 bp, Homo sapiens
tccgagctaaaggag

SEQ ID NO: 47267 - DNA, 15 bp, Homo sapiens
ccgagctaaaggagg

SEQ ID NO: 47268 - DNA, 15 bp, Homo sapiens
cgagctaaaggagga

SEQ ID NO: 47269 - DNA, 15 bp, Homo sapiens
gagctaaaggaggat

SEQ ID NO: 47270 - DNA, 15 bp, Homo sapiens
agctaaaggaggatg

SEQ ID NO: 47271 - DNA, 15 bp, Homo sapiens
gctaaaggaggatgt

SEQ ID NO: 47272 - DNA, 15 bp, Homo sapiens
ctaaaggaggatgtt

SEQ ID NO: 47273 - DNA, 15 bp, Homo sapiens
taaaggaggatgttt

SEQ ID NO: 47274 - DNA, 15 bp, Homo sapiens
aaaggaggatgtttg

SEQ ID NO: 47275 - DNA, 15 bp, Homo sapiens
aaggaggatgtttga

SEQ ID NO: 47276 - DNA, 15 bp, Homo sapiens
aggaggatgtttgaa

SEQ ID NO: 47277 - DNA, 15 bp, Homo sapiens
ggaggatgtttgaac

SEQ ID NO: 47278 - DNA, 15 bp, Homo sapiens
gaggatgtttgaacc

SEQ ID NO: 47279 - DNA, 15 bp, Homo sapiens
aggatgtttgaacct

SEQ ID NO: 47280 - DNA, 15 bp, Homo sapiens
ggatgtttgaacctt

SEQ ID NO: 47281 - DNA, 15 bp, Homo sapiens
gatgtttgaaccttt

SEQ ID NO: 47282 - DNA, 15 bp, Homo sapiens
atgtttgaacctttt

SEQ ID NO: 47283 - DNA, 15 bp, Homo sapiens
tgtttgaacctttta

SEQ ID NO: 47284 - DNA, 15 bp, Homo sapiens
gtttgaaccttttag

SEQ ID NO: 47285 - DNA, 15 bp, Homo sapiens
tttgaaccttttagc

SEQ ID NO: 47286 - DNA, 15 bp, Homo sapiens
ttgaaccttttagca

SEQ ID NO: 47287 - DNA, 15 bp, Homo sapiens
tgaaccttttagcaa

SEQ ID NO: 47288 - DNA, 15 bp, Homo sapiens
gaaccttttagcaaa

SEQ ID NO: 47289 - DNA, 15 bp, Homo sapiens
aaccttttagcaaag

SEQ ID NO: 47290 - DNA, 15 bp, Homo sapiens
accttttagcaaaga

SEQ ID NO: 47291 - DNA, 15 bp, Homo sapiens
ccttttagcaaagaa

SEQ ID NO: 47292 - DNA, 15 bp, Homo sapiens
cttttagcaaagaag

SEQ ID NO: 47293 - DNA, 15 bp, Homo sapiens
ttttagcaaagaagc

SEQ ID NO: 47294 - DNA, 15 bp, Homo sapiens
tttagcaaagaagct

SEQ ID NO: 47295 - DNA, 15 bp, Homo sapiens
ttagcaaagaagcta

SEQ ID NO: 47296 - DNA, 15 bp, Homo sapiens
tagcaaagaagctaa

SEQ ID NO: 47297 - DNA, 15 bp, Homo sapiens
agcaaagaagctaaa

SEQ ID NO: 47298 - DNA, 15 bp, Homo sapiens
gcaaagaagctaaaa

SEQ ID NO: 47299 - DNA, 15 bp, Homo sapiens
caaagaagctaaaaa

SEQ ID NO: 47300 - DNA, 15 bp, Homo sapiens
aaagaagctaaaaac

SEQ ID NO: 47301 - DNA, 15 bp, Homo sapiens
aagaagctaaaaacc

SEQ ID NO: 47302 - DNA, 15 bp, Homo sapiens
agaagctaaaaacct

SEQ ID NO: 47303 - DNA, 15 bp, Homo sapiens
gaagctaaaaacctt

SEQ ID NO: 47304 - DNA, 15 bp, Homo sapiens
aagctaaaaaccttg

SEQ ID NO: 47305 - DNA, 15 bp, Homo sapiens
agctaaaaaccttga

SEQ ID NO: 47306 - DNA, 15 bp, Homo sapiens
gctaaaaaccttgaa

SEQ ID NO: 47307 - DNA, 15 bp, Homo sapiens
ctaaaaaccttgaaa

SEQ ID NO: 47308 - DNA, 15 bp, Homo sapiens
taaaaaccttgaaaa

SEQ ID NO: 47309 - DNA, 15 bp, Homo sapiens
aaaaaccttgaaaaa

SEQ ID NO: 47310 - DNA, 15 bp, Homo sapiens
aaaaccttgaaaaaa

SEQ ID NO: 47311 - DNA, 15 bp, Homo sapiens
aaaccttgaaaaaac

SEQ ID NO: 47312 - DNA, 15 bp, Homo sapiens
aaccttgaaaaaaca

SEQ ID NO: 47313 - DNA, 15 bp, Homo sapiens
accttgaaaaaacat

SEQ ID NO: 47314 - DNA, 15 bp, Homo sapiens
ccttgaaaaaacatt

SEQ ID NO: 47315 - DNA, 15 bp, Homo sapiens
cttgaaaaaacatta

SEQ ID NO: 47316 - DNA, 15 bp, Homo sapiens
ttgaaaaaacattag

SEQ ID NO: 47317 - DNA, 15 bp, Homo sapiens
tgaaaaaacattaga

SEQ ID NO: 47318 - DNA, 15 bp, Homo sapiens
gaaaaaacattagac

SEQ ID NO: 47319 - DNA, 15 bp, Homo sapiens
aaaaaacattagacg

SEQ ID NO: 47320 - DNA, 15 bp, Homo sapiens
aaaaacattagacga

SEQ ID NO: 47321 - DNA, 15 bp, Homo sapiens
aaaacattagacgaa

SEQ ID NO: 47322 - DNA, 15 bp, Homo sapiens
aaacattagacgaat

SEQ ID NO: 47323 - DNA, 15 bp, Homo sapiens
aacattagacgaatg

SEQ ID NO: 47324 - DNA, 15 bp, Homo sapiens
acattagacgaatgg

SEQ ID NO: 47325 - DNA, 15 bp, Homo sapiens
cattagacgaatggc

SEQ ID NO: 47326 - DNA, 15 bp, Homo sapiens
attagacgaatggct

SEQ ID NO: 47327 - DNA, 15 bp, Homo sapiens
ttagacgaatggcta

SEQ ID NO: 47328 - DNA, 15 bp, Homo sapiens
tagacgaatggctaa

SEQ ID NO: 47329 - DNA, 15 bp, Homo sapiens
agacgaatggctaac

SEQ ID NO: 47330 - DNA, 15 bp, Homo sapiens
gacgaatggctaact

SEQ ID NO: 47331 - DNA, 15 bp, Homo sapiens
acgaatggctaacta

SEQ ID NO: 47332 - DNA, 15 bp, Homo sapiens
cgaatggctaactag

SEQ ID NO: 47333 - DNA, 15 bp, Homo sapiens
gaatggctaactaga

SEQ ID NO: 47334 - DNA, 15 bp, Homo sapiens
aatggctaactagaa

SEQ ID NO: 47335 - DNA, 15 bp, Homo sapiens
atggctaactagaaa

SEQ ID NO: 47336 - DNA, 15 bp, Homo sapiens
tggctaactagaaaa

SEQ ID NO: 47337 - DNA, 15 bp, Homo sapiens
ggctaactagaaaaa

SEQ ID NO: 47338 - DNA, 15 bp, Homo sapiens
gctaactagaaaaaa

SEQ ID NO: 47339 - DNA, 15 bp, Homo sapiens
ctaactagaaaaaac

SEQ ID NO: 47340 - DNA, 15 bp, Homo sapiens
taactagaaaaaaca

SEQ ID NO: 47341 - DNA, 15 bp, Homo sapiens
aactagaaaaaacag

SEQ ID NO: 47342 - DNA, 15 bp, Homo sapiens
actagaaaaaacagc

SEQ ID NO: 47343 - DNA, 15 bp, Homo sapiens
ctagaaaaaacagca

SEQ ID NO: 47344 - DNA, 15 bp, Homo sapiens
tagaaaaaacagcat

SEQ ID NO: 47345 - DNA, 15 bp, Homo sapiens
agaaaaaacagcata

SEQ ID NO: 47346 - DNA, 15 bp, Homo sapiens
gaaaaaacagcatag

SEQ ID NO: 47347 - DNA, 15 bp, Homo sapiens
aaaaaacagcataga

SEQ ID NO: 47348 - DNA, 15 bp, Homo sapiens
aaaaacagcatagag

SEQ ID NO: 47349 - DNA, 15 bp, Homo sapiens
aaaacagcatagaga

SEQ ID NO: 47350 - DNA, 15 bp, Homo sapiens
aaacagcatagagaa

SEQ ID NO: 47351 - DNA, 15 bp, Homo sapiens
aacagcatagagaag

SEQ ID NO: 47352 - DNA, 15 bp, Homo sapiens
acagcatagagaaga

SEQ ID NO: 47353 - DNA, 15 bp, Homo sapiens
cagcatagagaagac

SEQ ID NO: 47354 - DNA, 15 bp, Homo sapiens
agcatagagaagacc

SEQ ID NO: 47355 - DNA, 15 bp, Homo sapiens
gcatagagaagacct

SEQ ID NO: 47356 - DNA, 15 bp, Homo sapiens
catagagaagacctt

SEQ ID NO: 47357 - DNA, 15 bp, Homo sapiens
atagagaagacctta

SEQ ID NO: 47358 - DNA, 15 bp, Homo sapiens
tagagaagaccttaa

SEQ ID NO: 47359 - DNA, 15 bp, Homo sapiens
agagaagaccttaaa

SEQ ID NO: 47360 - DNA, 15 bp, Homo sapiens
gagaagaccttaaat

SEQ ID NO: 47361 - DNA, 15 bp, Homo sapiens
agaagaccttaaatg

SEQ ID NO: 47362 - DNA, 15 bp, Homo sapiens
gaagaccttaaatga

SEQ ID NO: 47363 - DNA, 15 bp, Homo sapiens
aagaccttaaatgac

SEQ ID NO: 47364 - DNA, 15 bp, Homo sapiens
agaccttaaatgacc

SEQ ID NO: 47365 - DNA, 15 bp, Homo sapiens
gaccttaaatgacct

SEQ ID NO: 47366 - DNA, 15 bp, Homo sapiens
accttaaatgacctg

SEQ ID NO: 47367 - DNA, 15 bp, Homo sapiens
ccttaaatgacctga

SEQ ID NO: 47368 - DNA, 15 bp, Homo sapiens
cttaaatgacctgat

SEQ ID NO: 47369 - DNA, 15 bp, Homo sapiens
ttaaatgacctgatg

SEQ ID NO: 47370 - DNA, 15 bp, Homo sapiens
taaatgacctgatgg

SEQ ID NO: 47371 - DNA, 15 bp, Homo sapiens
aaatgacctgatgga

SEQ ID NO: 47372 - DNA, 15 bp, Homo sapiens
aatgacctgatggag

SEQ ID NO: 47373 - DNA, 15 bp, Homo sapiens
atgacctgatggagc

SEQ ID NO: 47374 - DNA, 15 bp, Homo sapiens
tgacctgatggagct

SEQ ID NO: 47375 - DNA, 15 bp, Homo sapiens
gacctgatggagctg

SEQ ID NO: 47376 - DNA, 15 bp, Homo sapiens
acctgatggagctga

SEQ ID NO: 47377 - DNA, 15 bp, Homo sapiens
cctgatggagctgaa

SEQ ID NO: 47378 - DNA, 15 bp, Homo sapiens
ctgatggagctgaaa

SEQ ID NO: 47379 - DNA, 15 bp, Homo sapiens
tgatggagctgaaaa

SEQ ID NO: 47380 - DNA, 15 bp, Homo sapiens
gatggagctgaaaac

SEQ ID NO: 47381 - DNA, 15 bp, Homo sapiens
atggagctgaaaacc

SEQ ID NO: 47382 - DNA, 15 bp, Homo sapiens
tggagctgaaaacca

SEQ ID NO: 47383 - DNA, 15 bp, Homo sapiens
ggagctgaaaaccat

SEQ ID NO: 47384 - DNA, 15 bp, Homo sapiens
gagctgaaaaccatg

SEQ ID NO: 47385 - DNA, 15 bp, Homo sapiens
agctgaaaaccatgg

SEQ ID NO: 47386 - DNA, 15 bp, Homo sapiens
gctgaaaaccatggc

SEQ ID NO: 47387 - DNA, 15 bp, Homo sapiens
ctgaaaaccatggca

SEQ ID NO: 47388 - DNA, 15 bp, Homo sapiens
tgaaaaccatggcac

SEQ ID NO: 47389 - DNA, 15 bp, Homo sapiens
gaaaaccatggcacg

SEQ ID NO: 47390 - DNA, 15 bp, Homo sapiens
aaaaccatggcacga

SEQ ID NO: 47391 - DNA, 15 bp, Homo sapiens
aaaccatggcacgag

SEQ ID NO: 47392 - DNA, 15 bp, Homo sapiens
aaccatggcacgaga

SEQ ID NO: 47393 - DNA, 15 bp, Homo sapiens
accatggcacgagaa

SEQ ID NO: 47394 - DNA, 15 bp, Homo sapiens
ccatggcacgagaac

SEQ ID NO: 47395 - DNA, 15 bp, Homo sapiens
catggcacgagaact

SEQ ID NO: 47396 - DNA, 15 bp, Homo sapiens
atggcacgagaacta

SEQ ID NO: 47397 - DNA, 15 bp, Homo sapiens
tggcacgagaactat

SEQ ID NO: 47398 - DNA, 15 bp, Homo sapiens
ggcacgagaactatg

SEQ ID NO: 47399 - DNA, 15 bp, Homo sapiens
gcacgagaactatgt

SEQ ID NO: 47400 - DNA, 15 bp, Homo sapiens
cacgagaactatgtg

SEQ ID NO: 47401 - DNA, 15 bp, Homo sapiens
acgagaactatgtga

SEQ ID NO: 47402 - DNA, 15 bp, Homo sapiens
cgagaactatgtgac

SEQ ID NO: 47403 - DNA, 15 bp, Homo sapiens
gagaactatgtgaca

SEQ ID NO: 47404 - DNA, 15 bp, Homo sapiens
agaactatgtgacac

SEQ ID NO: 47405 - DNA, 15 bp, Homo sapiens
gaactatgtgacaca

SEQ ID NO: 47406 - DNA, 15 bp, Homo sapiens
aactatgtgacacat

SEQ ID NO: 47407 - DNA, 15 bp, Homo sapiens
actatgtgacacatg

SEQ ID NO: 47408 - DNA, 15 bp, Homo sapiens
ctatgtgacacatgc

SEQ ID NO: 47409 - DNA, 15 bp, Homo sapiens
tatgtgacacatgca

SEQ ID NO: 47410 - DNA, 15 bp, Homo sapiens
atgtgacacatgcac

SEQ ID NO: 47411 - DNA, 15 bp, Homo sapiens
tgtgacacatgcaca

SEQ ID NO: 47412 - DNA, 15 bp, Homo sapiens
gtgacacatgcacaa

SEQ ID NO: 47413 - DNA, 15 bp, Homo sapiens
tgacacatgcacaag

SEQ ID NO: 47414 - DNA, 15 bp, Homo sapiens
gacacatgcacaagc

SEQ ID NO: 47415 - DNA, 15 bp, Homo sapiens
acacatgcacaagct

SEQ ID NO: 47416 - DNA, 15 bp, Homo sapiens
cacatgcacaagctt

SEQ ID NO: 47417 - DNA, 15 bp, Homo sapiens
acatgcacaagcttc

SEQ ID NO: 47418 - DNA, 15 bp, Homo sapiens
catgcacaagcttca

SEQ ID NO: 47419 - DNA, 15 bp, Homo sapiens
atgcacaagcttcag

SEQ ID NO: 47420 - DNA, 15 bp, Homo sapiens
tgcacaagcttcagt

SEQ ID NO: 47421 - DNA, 15 bp, Homo sapiens
gcacaagcttcagta

SEQ ID NO: 47422 - DNA, 15 bp, Homo sapiens
cacaagcttcagtag

SEQ ID NO: 47423 - DNA, 15 bp, Homo sapiens
acaagcttcagtagc

SEQ ID NO: 47424 - DNA, 15 bp, Homo sapiens
caagcttcagtagct

SEQ ID NO: 47425 - DNA, 15 bp, Homo sapiens
aagcttcagtagctg

SEQ ID NO: 47426 - DNA, 15 bp, Homo sapiens
agcttcagtagctga

SEQ ID NO: 47427 - DNA, 15 bp, Homo sapiens
gcttcagtagctgat

SEQ ID NO: 47428 - DNA, 15 bp, Homo sapiens
cttcagtagctgatt

SEQ ID NO: 47429 - DNA, 15 bp, Homo sapiens
ttcagtagctgattc

SEQ ID NO: 47430 - DNA, 15 bp, Homo sapiens
tcagtagctgattca

SEQ ID NO: 47431 - DNA, 15 bp, Homo sapiens
cagtagctgattcaa

SEQ ID NO: 47432 - DNA, 15 bp, Homo sapiens
agtagctgattcaat

SEQ ID NO: 47433 - DNA, 15 bp, Homo sapiens
gtagctgattcaatc

SEQ ID NO: 47434 - DNA, 15 bp, Homo sapiens
tagctgattcaatca

SEQ ID NO: 47435 - DNA, 15 bp, Homo sapiens
agctgattcaatcaa

SEQ ID NO: 47436 - DNA, 15 bp, Homo sapiens
gctgattcaatcaag

SEQ ID NO: 47437 - DNA, 15 bp, Homo sapiens
ctgattcaatcaagt

SEQ ID NO: 47438 - DNA, 15 bp, Homo sapiens
tgattcaatcaagtg

SEQ ID NO: 47439 - DNA, 15 bp, Homo sapiens
gattcaatcaagtgg

SEQ ID NO: 47440 - DNA, 15 bp, Homo sapiens
attcaatcaagtgga

SEQ ID NO: 47441 - DNA, 15 bp, Homo sapiens
ttcaatcaagtggaa

SEQ ID NO: 47442 - DNA, 15 bp, Homo sapiens
tcaatcaagtggaag

SEQ ID NO: 47443 - DNA, 15 bp, Homo sapiens
caatcaagtggaaga

SEQ ID NO: 47444 - DNA, 15 bp, Homo sapiens
aatcaagtggaagaa

SEQ ID NO: 47445 - DNA, 15 bp, Homo sapiens
atcaagtggaagaaa

SEQ ID NO: 47446 - DNA, 15 bp, Homo sapiens
tcaagtggaagaaag

SEQ ID NO: 47447 - DNA, 15 bp, Homo sapiens
caagtggaagaaagg

SEQ ID NO: 47448 - DNA, 15 bp, Homo sapiens
aagtggaagaaaggg

SEQ ID NO: 47449 - DNA, 15 bp, Homo sapiens
agtggaagaaaggga

SEQ ID NO: 47450 - DNA, 15 bp, Homo sapiens
gtggaagaaagggat

SEQ ID NO: 47451 - DNA, 15 bp, Homo sapiens
tggaagaaagggatt

SEQ ID NO: 47452 - DNA, 15 bp, Homo sapiens
ggaagaaagggattg

SEQ ID NO: 47453 - DNA, 15 bp, Homo sapiens
gaagaaagggattga

SEQ ID NO: 47454 - DNA, 15 bp, Homo sapiens
aagaaagggattgaa

SEQ ID NO: 47455 - DNA, 15 bp, Homo sapiens
agaaagggattgaag

SEQ ID NO: 47456 - DNA, 15 bp, Homo sapiens
gaaagggattgaaga

SEQ ID NO: 47457 - DNA, 15 bp, Homo sapiens
aaagggattgaagat

SEQ ID NO: 47458 - DNA, 15 bp, Homo sapiens
aagggattgaagatc

SEQ ID NO: 47459 - DNA, 15 bp, Homo sapiens
agggattgaagatca

SEQ ID NO: 47460 - DNA, 15 bp, Homo sapiens
gggattgaagatcaa

SEQ ID NO: 47461 - DNA, 15 bp, Homo sapiens
ggattgaagatcaaa

SEQ ID NO: 47462 - DNA, 15 bp, Homo sapiens
gattgaagatcaaat

SEQ ID NO: 47463 - DNA, 15 bp, Homo sapiens
attgaagatcaaatg

SEQ ID NO: 47464 - DNA, 15 bp, Homo sapiens
ttgaagatcaaatga

SEQ ID NO: 47465 - DNA, 15 bp, Homo sapiens
tgaagatcaaatgaa

SEQ ID NO: 47466 - DNA, 15 bp, Homo sapiens
gaagatcaaatgaat

SEQ ID NO: 47467 - DNA, 15 bp, Homo sapiens
aagatcaaatgaatg

SEQ ID NO: 47468 - DNA, 15 bp, Homo sapiens
agatcaaatgaatga

SEQ ID NO: 47469 - DNA, 15 bp, Homo sapiens
gatcaaatgaatgaa

SEQ ID NO: 47470 - DNA, 15 bp, Homo sapiens
atcaaatgaatgaaa

SEQ ID NO: 47471 - DNA, 15 bp, Homo sapiens
tcaaatgaatgaaat

SEQ ID NO: 47472 - DNA, 15 bp, Homo sapiens
caaatgaatgaaatg

SEQ ID NO: 47473 - DNA, 15 bp, Homo sapiens
aaatgaatgaaatga

SEQ ID NO: 47474 - DNA, 15 bp, Homo sapiens
aatgaatgaaatgaa

SEQ ID NO: 47475 - DNA, 15 bp, Homo sapiens
atgaatgaaatgaag

SEQ ID NO: 47476 - DNA, 15 bp, Homo sapiens
tgaatgaaatgaagc

SEQ ID NO: 47477 - DNA, 15 bp, Homo sapiens
gaatgaaatgaagca

SEQ ID NO: 47478 - DNA, 15 bp, Homo sapiens
aatgaaatgaagcaa

SEQ ID NO: 47479 - DNA, 15 bp, Homo sapiens
atgaaatgaagcaag

SEQ ID NO: 47480 - DNA, 15 bp, Homo sapiens
tgaaatgaagcaaga

SEQ ID NO: 47481 - DNA, 15 bp, Homo sapiens
gaaatgaagcaagaa

SEQ ID NO: 47482 - DNA, 15 bp, Homo sapiens
aaatgaagcaagaag

SEQ ID NO: 47483 - DNA, 15 bp, Homo sapiens
aatgaagcaagaaga

SEQ ID NO: 47484 - DNA, 15 bp, Homo sapiens
atgaagcaagaagag

SEQ ID NO: 47485 - DNA, 15 bp, Homo sapiens
tgaagcaagaagaga

SEQ ID NO: 47486 - DNA, 15 bp, Homo sapiens
gaagcaagaagagaa

SEQ ID NO: 47487 - DNA, 15 bp, Homo sapiens
aagcaagaagagaag

SEQ ID NO: 47488 - DNA, 15 bp, Homo sapiens
agcaagaagagaagt

SEQ ID NO: 47489 - DNA, 15 bp, Homo sapiens
gcaagaagagaagtt

SEQ ID NO: 47490 - DNA, 15 bp, Homo sapiens
caagaagagaagttt

SEQ ID NO: 47491 - DNA, 15 bp, Homo sapiens
aagaagagaagttta

SEQ ID NO: 47492 - DNA, 15 bp, Homo sapiens
agaagagaagtttag

SEQ ID NO: 47493 - DNA, 15 bp, Homo sapiens
gaagagaagtttaga

SEQ ID NO: 47494 - DNA, 15 bp, Homo sapiens
aagagaagtttagag

SEQ ID NO: 47495 - DNA, 15 bp, Homo sapiens
agagaagtttagaga

SEQ ID NO: 47496 - DNA, 15 bp, Homo sapiens
gagaagtttagagaa

SEQ ID NO: 47497 - DNA, 15 bp, Homo sapiens
agaagtttagagaaa

SEQ ID NO: 47498 - DNA, 15 bp, Homo sapiens
gaagtttagagaaaa

SEQ ID NO: 47499 - DNA, 15 bp, Homo sapiens
aagtttagagaaaaa

SEQ ID NO: 47500 - DNA, 15 bp, Homo sapiens
agtttagagaaaaaa

SEQ ID NO: 47501 - DNA, 15 bp, Homo sapiens
gtttagagaaaaaag

SEQ ID NO: 47502 - DNA, 15 bp, Homo sapiens
tttagagaaaaaaga

SEQ ID NO: 47503 - DNA, 15 bp, Homo sapiens
ttagagaaaaaagag

SEQ ID NO: 47504 - DNA, 15 bp, Homo sapiens
tagagaaaaaagagt

SEQ ID NO: 47505 - DNA, 15 bp, Homo sapiens
agagaaaaaagagta

SEQ ID NO: 47506 - DNA, 15 bp, Homo sapiens
gagaaaaaagagtaa

SEQ ID NO: 47507 - DNA, 15 bp, Homo sapiens
agaaaaaagagtaaa

SEQ ID NO: 47508 - DNA, 15 bp, Homo sapiens
gaaaaaagagtaaaa

SEQ ID NO: 47509 - DNA, 15 bp, Homo sapiens
aaaaaagagtaaaaa

SEQ ID NO: 47510 - DNA, 15 bp, Homo sapiens
aaaaagagtaaaaag

SEQ ID NO: 47511 - DNA, 15 bp, Homo sapiens
aaaagagtaaaaaga

SEQ ID NO: 47512 - DNA, 15 bp, Homo sapiens
aaagagtaaaaagaa

SEQ ID NO: 47513 - DNA, 15 bp, Homo sapiens
aagagtaaaaagaaa

SEQ ID NO: 47514 - DNA, 15 bp, Homo sapiens
agagtaaaaagaaat

SEQ ID NO: 47515 - DNA, 15 bp, Homo sapiens
gagtaaaaagaaatg

SEQ ID NO: 47516 - DNA, 15 bp, Homo sapiens
agtaaaaagaaatga

SEQ ID NO: 47517 - DNA, 15 bp, Homo sapiens
gtaaaaagaaatgaa

SEQ ID NO: 47518 - DNA, 15 bp, Homo sapiens
taaaaagaaatgaac

SEQ ID NO: 47519 - DNA, 15 bp, Homo sapiens
aaaaagaaatgaaca

SEQ ID NO: 47520 - DNA, 15 bp, Homo sapiens
aaaagaaatgaacaa

SEQ ID NO: 47521 - DNA, 15 bp, Homo sapiens
aaagaaatgaacaaa

SEQ ID NO: 47522 - DNA, 15 bp, Homo sapiens
aagaaatgaacaaag

SEQ ID NO: 47523 - DNA, 15 bp, Homo sapiens
agaaatgaacaaagc

SEQ ID NO: 47524 - DNA, 15 bp, Homo sapiens
gaaatgaacaaagcc

SEQ ID NO: 47525 - DNA, 15 bp, Homo sapiens
aaatgaacaaagcct

SEQ ID NO: 47526 - DNA, 15 bp, Homo sapiens
aatgaacaaagcctc

SEQ ID NO: 47527 - DNA, 15 bp, Homo sapiens
atgaacaaagcctcc

SEQ ID NO: 47528 - DNA, 15 bp, Homo sapiens
tgaacaaagcctcca

SEQ ID NO: 47529 - DNA, 15 bp, Homo sapiens
gaacaaagcctccaa

SEQ ID NO: 47530 - DNA, 15 bp, Homo sapiens
aacaaagcctccaag

SEQ ID NO: 47531 - DNA, 15 bp, Homo sapiens
acaaagcctccaaga

SEQ ID NO: 47532 - DNA, 15 bp, Homo sapiens
caaagcctccaagaa

SEQ ID NO: 47533 - DNA, 15 bp, Homo sapiens
aaagcctccaagaaa

SEQ ID NO: 47534 - DNA, 15 bp, Homo sapiens
aagcctccaagaaat

SEQ ID NO: 47535 - DNA, 15 bp, Homo sapiens
agcctccaagaaata

SEQ ID NO: 47536 - DNA, 15 bp, Homo sapiens
gcctccaagaaatat

SEQ ID NO: 47537 - DNA, 15 bp, Homo sapiens
cctccaagaaatatg

SEQ ID NO: 47538 - DNA, 15 bp, Homo sapiens
ctccaagaaatatgg

SEQ ID NO: 47539 - DNA, 15 bp, Homo sapiens
tccaagaaatatggg

SEQ ID NO: 47540 - DNA, 15 bp, Homo sapiens
ccaagaaatatggga

SEQ ID NO: 47541 - DNA, 15 bp, Homo sapiens
caagaaatatgggac

SEQ ID NO: 47542 - DNA, 15 bp, Homo sapiens
aagaaatatgggact

SEQ ID NO: 47543 - DNA, 15 bp, Homo sapiens
agaaatatgggacta

SEQ ID NO: 47544 - DNA, 15 bp, Homo sapiens
gaaatatgggactat

SEQ ID NO: 47545 - DNA, 15 bp, Homo sapiens
aaatatgggactatg

SEQ ID NO: 47546 - DNA, 15 bp, Homo sapiens
aatatgggactatgt

SEQ ID NO: 47547 - DNA, 15 bp, Homo sapiens
atatgggactatgtg

SEQ ID NO: 47548 - DNA, 15 bp, Homo sapiens
tatgggactatgtga

SEQ ID NO: 47549 - DNA, 15 bp, Homo sapiens
atgggactatgtgaa

SEQ ID NO: 47550 - DNA, 15 bp, Homo sapiens
tgggactatgtgaaa

SEQ ID NO: 47551 - DNA, 15 bp, Homo sapiens
gggactatgtgaaaa

SEQ ID NO: 47552 - DNA, 15 bp, Homo sapiens
ggactatgtgaaaag

SEQ ID NO: 47553 - DNA, 15 bp, Homo sapiens
gactatgtgaaaaga

SEQ ID NO: 47554 - DNA, 15 bp, Homo sapiens
actatgtgaaaagac

SEQ ID NO: 47555 - DNA, 15 bp, Homo sapiens
ctatgtgaaaagacc

SEQ ID NO: 47556 - DNA, 15 bp, Homo sapiens
tatgtgaaaagacca

SEQ ID NO: 47557 - DNA, 15 bp, Homo sapiens
atgtgaaaagaccaa

SEQ ID NO: 47558 - DNA, 15 bp, Homo sapiens
tgtgaaaagaccaaa

SEQ ID NO: 47559 - DNA, 15 bp, Homo sapiens
gtgaaaagaccaaat

SEQ ID NO: 47560 - DNA, 15 bp, Homo sapiens
tgaaaagaccaaatc

SEQ ID NO: 47561 - DNA, 15 bp, Homo sapiens
gaaaagaccaaatct

SEQ ID NO: 47562 - DNA, 15 bp, Homo sapiens
aaaagaccaaatcta

SEQ ID NO: 47563 - DNA, 15 bp, Homo sapiens
aaagaccaaatctac

SEQ ID NO: 47564 - DNA, 15 bp, Homo sapiens
aagaccaaatctaca

SEQ ID NO: 47565 - DNA, 15 bp, Homo sapiens
agaccaaatctacat

SEQ ID NO: 47566 - DNA, 15 bp, Homo sapiens
gaccaaatctacatc

SEQ ID NO: 47567 - DNA, 15 bp, Homo sapiens
accaaatctacatct

SEQ ID NO: 47568 - DNA, 15 bp, Homo sapiens
ccaaatctacatctg

SEQ ID NO: 47569 - DNA, 15 bp, Homo sapiens
caaatctacatctga

SEQ ID NO: 47570 - DNA, 15 bp, Homo sapiens
aaatctacatctgat

SEQ ID NO: 47571 - DNA, 15 bp, Homo sapiens
aatctacatctgatt

SEQ ID NO: 47572 - DNA, 15 bp, Homo sapiens
atctacatctgattg

SEQ ID NO: 47573 - DNA, 15 bp, Homo sapiens
tctacatctgattgg

SEQ ID NO: 47574 - DNA, 15 bp, Homo sapiens
ctacatctgattggt

SEQ ID NO: 47575 - DNA, 15 bp, Homo sapiens
tacatctgattggtg

SEQ ID NO: 47576 - DNA, 15 bp, Homo sapiens
acatctgattggtgt

SEQ ID NO: 47577 - DNA, 15 bp, Homo sapiens
catctgattggtgta

SEQ ID NO: 47578 - DNA, 15 bp, Homo sapiens
atctgattggtgtac

SEQ ID NO: 47579 - DNA, 15 bp, Homo sapiens
tctgattggtgtacc

SEQ ID NO: 47580 - DNA, 15 bp, Homo sapiens
ctgattggtgtacct

SEQ ID NO: 47581 - DNA, 15 bp, Homo sapiens
tgattggtgtacctg

SEQ ID NO: 47582 - DNA, 15 bp, Homo sapiens
gattggtgtacctga

SEQ ID NO: 47583 - DNA, 15 bp, Homo sapiens
attggtgtacctgaa

SEQ ID NO: 47584 - DNA, 15 bp, Homo sapiens
ttggtgtacctgaaa

SEQ ID NO: 47585 - DNA, 15 bp, Homo sapiens
tggtgtacctgaaag

SEQ ID NO: 47586 - DNA, 15 bp, Homo sapiens
ggtgtacctgaaagt

SEQ ID NO: 47587 - DNA, 15 bp, Homo sapiens
gtgtacctgaaagtg

SEQ ID NO: 47588 - DNA, 15 bp, Homo sapiens
tgtacctgaaagtga

SEQ ID NO: 47589 - DNA, 15 bp, Homo sapiens
gtacctgaaagtgat

SEQ ID NO: 47590 - DNA, 15 bp, Homo sapiens
tacctgaaagtgatg

SEQ ID NO: 47591 - DNA, 15 bp, Homo sapiens
acctgaaagtgatgg

SEQ ID NO: 47592 - DNA, 15 bp, Homo sapiens
cctgaaagtgatggg

SEQ ID NO: 47593 - DNA, 15 bp, Homo sapiens
ctgaaagtgatgggg

SEQ ID NO: 47594 - DNA, 15 bp, Homo sapiens
tgaaagtgatgggga

SEQ ID NO: 47595 - DNA, 15 bp, Homo sapiens
gaaagtgatggggag

SEQ ID NO: 47596 - DNA, 15 bp, Homo sapiens
aaagtgatggggaga

SEQ ID NO: 47597 - DNA, 15 bp, Homo sapiens
aagtgatggggagaa

SEQ ID NO: 47598 - DNA, 15 bp, Homo sapiens
agtgatggggagaat

SEQ ID NO: 47599 - DNA, 15 bp, Homo sapiens
gtgatggggagaatg

SEQ ID NO: 47600 - DNA, 15 bp, Homo sapiens
tgatggggagaatgg

SEQ ID NO: 47601 - DNA, 15 bp, Homo sapiens
gatggggagaatgga

SEQ ID NO: 47602 - DNA, 15 bp, Homo sapiens
atggggagaatggaa

SEQ ID NO: 47603 - DNA, 15 bp, Homo sapiens
tggggagaatggaac

SEQ ID NO: 47604 - DNA, 15 bp, Homo sapiens
ggggagaatggaacc

SEQ ID NO: 47605 - DNA, 15 bp, Homo sapiens
gggagaatggaacca

SEQ ID NO: 47606 - DNA, 15 bp, Homo sapiens
ggagaatggaaccaa

SEQ ID NO: 47607 - DNA, 15 bp, Homo sapiens
gagaatggaaccaag

SEQ ID NO: 47608 - DNA, 15 bp, Homo sapiens
agaatggaaccaagt

SEQ ID NO: 47609 - DNA, 15 bp, Homo sapiens
gaatggaaccaagtt

SEQ ID NO: 47610 - DNA, 15 bp, Homo sapiens
aatggaaccaagttg

SEQ ID NO: 47611 - DNA, 15 bp, Homo sapiens
atggaaccaagttgg

SEQ ID NO: 47612 - DNA, 15 bp, Homo sapiens
tggaaccaagttgga

SEQ ID NO: 47613 - DNA, 15 bp, Homo sapiens
ggaaccaagttggaa

SEQ ID NO: 47614 - DNA, 15 bp, Homo sapiens
gaaccaagttggaaa

SEQ ID NO: 47615 - DNA, 15 bp, Homo sapiens
aaccaagttggaaaa

SEQ ID NO: 47616 - DNA, 15 bp, Homo sapiens
accaagttggaaaac

SEQ ID NO: 47617 - DNA, 15 bp, Homo sapiens
ccaagttggaaaacg

SEQ ID NO: 47618 - DNA, 15 bp, Homo sapiens
caagttggaaaacgc

SEQ ID NO: 47619 - DNA, 15 bp, Homo sapiens
aagttggaaaacgct

SEQ ID NO: 47620 - DNA, 15 bp, Homo sapiens
agttggaaaacgctc

SEQ ID NO: 47621 - DNA, 15 bp, Homo sapiens
gttggaaaacgctct

SEQ ID NO: 47622 - DNA, 15 bp, Homo sapiens
ttggaaaacgctctg

SEQ ID NO: 47623 - DNA, 15 bp, Homo sapiens
tggaaaacgctctgc

SEQ ID NO: 47624 - DNA, 15 bp, Homo sapiens
ggaaaacgctctgca

SEQ ID NO: 47625 - DNA, 15 bp, Homo sapiens
gaaaacgctctgcag

SEQ ID NO: 47626 - DNA, 15 bp, Homo sapiens
aaaacgctctgcagg

SEQ ID NO: 47627 - DNA, 15 bp, Homo sapiens
aaacgctctgcagga

SEQ ID NO: 47628 - DNA, 15 bp, Homo sapiens
aacgctctgcaggat

SEQ ID NO: 47629 - DNA, 15 bp, Homo sapiens
acgctctgcaggata

SEQ ID NO: 47630 - DNA, 15 bp, Homo sapiens
cgctctgcaggatat

SEQ ID NO: 47631 - DNA, 15 bp, Homo sapiens
gctctgcaggatatt

SEQ ID NO: 47632 - DNA, 15 bp, Homo sapiens
ctctgcaggatatta

SEQ ID NO: 47633 - DNA, 15 bp, Homo sapiens
tctgcaggatattat

SEQ ID NO: 47634 - DNA, 15 bp, Homo sapiens
ctgcaggatattatc

SEQ ID NO: 47635 - DNA, 15 bp, Homo sapiens
tgcaggatattatcc

SEQ ID NO: 47636 - DNA, 15 bp, Homo sapiens
gcaggatattatcca

SEQ ID NO: 47637 - DNA, 15 bp, Homo sapiens
caggatattatccag

SEQ ID NO: 47638 - DNA, 15 bp, Homo sapiens
aggatattatccagg

SEQ ID NO: 47639 - DNA, 15 bp, Homo sapiens
ggatattatccagga

SEQ ID NO: 47640 - DNA, 15 bp, Homo sapiens
gatattatccaggag

SEQ ID NO: 47641 - DNA, 15 bp, Homo sapiens
atattatccaggaga

SEQ ID NO: 47642 - DNA, 15 bp, Homo sapiens
tattatccaggagaa

SEQ ID NO: 47643 - DNA, 15 bp, Homo sapiens
attatccaggagaac

SEQ ID NO: 47644 - DNA, 15 bp, Homo sapiens
ttatccaggagaact

SEQ ID NO: 47645 - DNA, 15 bp, Homo sapiens
tatccaggagaactt

SEQ ID NO: 47646 - DNA, 15 bp, Homo sapiens
atccaggagaacttc

SEQ ID NO: 47647 - DNA, 15 bp, Homo sapiens
tccaggagaacttcc

SEQ ID NO: 47648 - DNA, 15 bp, Homo sapiens
ccaggagaacttccc

SEQ ID NO: 47649 - DNA, 15 bp, Homo sapiens
caggagaacttcccc

SEQ ID NO: 47650 - DNA, 15 bp, Homo sapiens
aggagaacttcccca

SEQ ID NO: 47651 - DNA, 15 bp, Homo sapiens
ggagaacttccccaa

SEQ ID NO: 47652 - DNA, 15 bp, Homo sapiens
gagaacttccccaat

SEQ ID NO: 47653 - DNA, 15 bp, Homo sapiens
agaacttccccaatc

SEQ ID NO: 47654 - DNA, 15 bp, Homo sapiens
gaacttccccaatct

SEQ ID NO: 47655 - DNA, 15 bp, Homo sapiens
aacttccccaatcta

SEQ ID NO: 47656 - DNA, 15 bp, Homo sapiens
acttccccaatctag

SEQ ID NO: 47657 - DNA, 15 bp, Homo sapiens
cttccccaatctagt

SEQ ID NO: 47658 - DNA, 15 bp, Homo sapiens
ttccccaatctagtg

SEQ ID NO: 47659 - DNA, 15 bp, Homo sapiens
tccccaatctagtga

SEQ ID NO: 47660 - DNA, 15 bp, Homo sapiens
ccccaatctagtgag

SEQ ID NO: 47661 - DNA, 15 bp, Homo sapiens
cccaatctagtgagg

SEQ ID NO: 47662 - DNA, 15 bp, Homo sapiens
ccaatctagtgaggc

SEQ ID NO: 47663 - DNA, 15 bp, Homo sapiens
caatctagtgaggca

SEQ ID NO: 47664 - DNA, 15 bp, Homo sapiens
aatctagtgaggcag

SEQ ID NO: 47665 - DNA, 15 bp, Homo sapiens
atctagtgaggcagg

SEQ ID NO: 47666 - DNA, 15 bp, Homo sapiens
tctagtgaggcaggc

SEQ ID NO: 47667 - DNA, 15 bp, Homo sapiens
ctagtgaggcaggcc

SEQ ID NO: 47668 - DNA, 15 bp, Homo sapiens
tagtgaggcaggcca

SEQ ID NO: 47669 - DNA, 15 bp, Homo sapiens
agtgaggcaggccag

SEQ ID NO: 47670 - DNA, 15 bp, Homo sapiens
gtgaggcaggccagc

SEQ ID NO: 47671 - DNA, 15 bp, Homo sapiens
tgaggcaggccagca

SEQ ID NO: 47672 - DNA, 15 bp, Homo sapiens
gaggcaggccagcat

SEQ ID NO: 47673 - DNA, 15 bp, Homo sapiens
aggcaggccagcatt

SEQ ID NO: 47674 - DNA, 15 bp, Homo sapiens
ggcaggccagcattc

SEQ ID NO: 47675 - DNA, 15 bp, Homo sapiens
gcaggccagcattca

SEQ ID NO: 47676 - DNA, 15 bp, Homo sapiens
caggccagcattcaa

SEQ ID NO: 47677 - DNA, 15 bp, Homo sapiens
aggccagcattcaaa

SEQ ID NO: 47678 - DNA, 15 bp, Homo sapiens
ggccagcattcaaat

SEQ ID NO: 47679 - DNA, 15 bp, Homo sapiens
gccagcattcaaatt

SEQ ID NO: 47680 - DNA, 15 bp, Homo sapiens
ccagcattcaaattc

SEQ ID NO: 47681 - DNA, 15 bp, Homo sapiens
cagcattcaaattca

SEQ ID NO: 47682 - DNA, 15 bp, Homo sapiens
agcattcaaattcag

SEQ ID NO: 47683 - DNA, 15 bp, Homo sapiens
gcattcaaattcagg

SEQ ID NO: 47684 - DNA, 15 bp, Homo sapiens
cattcaaattcagga

SEQ ID NO: 47685 - DNA, 15 bp, Homo sapiens
attcaaattcaggaa

SEQ ID NO: 47686 - DNA, 15 bp, Homo sapiens
ttcaaattcaggaaa

SEQ ID NO: 47687 - DNA, 15 bp, Homo sapiens
tcaaattcaggaaat

SEQ ID NO: 47688 - DNA, 15 bp, Homo sapiens
caaattcaggaaata

SEQ ID NO: 47689 - DNA, 15 bp, Homo sapiens
aaattcaggaaatac

SEQ ID NO: 47690 - DNA, 15 bp, Homo sapiens
aattcaggaaataca

SEQ ID NO: 47691 - DNA, 15 bp, Homo sapiens
attcaggaaatacag

SEQ ID NO: 47692 - DNA, 15 bp, Homo sapiens
ttcaggaaatacaga

SEQ ID NO: 47693 - DNA, 15 bp, Homo sapiens
tcaggaaatacagag

SEQ ID NO: 47694 - DNA, 15 bp, Homo sapiens
caggaaatacagaga

SEQ ID NO: 47695 - DNA, 15 bp, Homo sapiens
aggaaatacagagaa

SEQ ID NO: 47696 - DNA, 15 bp, Homo sapiens
ggaaatacagagaat

SEQ ID NO: 47697 - DNA, 15 bp, Homo sapiens
gaaatacagagaatg

SEQ ID NO: 47698 - DNA, 15 bp, Homo sapiens
aaatacagagaatgc

SEQ ID NO: 47699 - DNA, 15 bp, Homo sapiens
aatacagagaatgcc

SEQ ID NO: 47700 - DNA, 15 bp, Homo sapiens
atacagagaatgccg

SEQ ID NO: 47701 - DNA, 15 bp, Homo sapiens
tacagagaatgccgc

SEQ ID NO: 47702 - DNA, 15 bp, Homo sapiens
acagagaatgccgca

SEQ ID NO: 47703 - DNA, 15 bp, Homo sapiens
cagagaatgccgcaa

SEQ ID NO: 47704 - DNA, 15 bp, Homo sapiens
agagaatgccgcaaa

SEQ ID NO: 47705 - DNA, 15 bp, Homo sapiens
gagaatgccgcaaag

SEQ ID NO: 47706 - DNA, 15 bp, Homo sapiens
agaatgccgcaaaga

SEQ ID NO: 47707 - DNA, 15 bp, Homo sapiens
gaatgccgcaaagat

SEQ ID NO: 47708 - DNA, 15 bp, Homo sapiens
aatgccgcaaagata

SEQ ID NO: 47709 - DNA, 15 bp, Homo sapiens
atgccgcaaagatac

SEQ ID NO: 47710 - DNA, 15 bp, Homo sapiens
tgccgcaaagatact

SEQ ID NO: 47711 - DNA, 15 bp, Homo sapiens
gccgcaaagatactc

SEQ ID NO: 47712 - DNA, 15 bp, Homo sapiens
ccgcaaagatactcc

SEQ ID NO: 47713 - DNA, 15 bp, Homo sapiens
cgcaaagatactcct

SEQ ID NO: 47714 - DNA, 15 bp, Homo sapiens
gcaaagatactcctc

SEQ ID NO: 47715 - DNA, 15 bp, Homo sapiens
caaagatactcctca

SEQ ID NO: 47716 - DNA, 15 bp, Homo sapiens
aaagatactcctcaa

SEQ ID NO: 47717 - DNA, 15 bp, Homo sapiens
aagatactcctcaag

SEQ ID NO: 47718 - DNA, 15 bp, Homo sapiens
agatactcctcaaga

SEQ ID NO: 47719 - DNA, 15 bp, Homo sapiens
gatactcctcaagaa

SEQ ID NO: 47720 - DNA, 15 bp, Homo sapiens
atactcctcaagaag

SEQ ID NO: 47721 - DNA, 15 bp, Homo sapiens
tactcctcaagaaga

SEQ ID NO: 47722 - DNA, 15 bp, Homo sapiens
actcctcaagaagag

SEQ ID NO: 47723 - DNA, 15 bp, Homo sapiens
ctcctcaagaagagt

SEQ ID NO: 47724 - DNA, 15 bp, Homo sapiens
tcctcaagaagagta

SEQ ID NO: 47725 - DNA, 15 bp, Homo sapiens
cctcaagaagagtaa

SEQ ID NO: 47726 - DNA, 15 bp, Homo sapiens
ctcaagaagagtaac

SEQ ID NO: 47727 - DNA, 15 bp, Homo sapiens
tcaagaagagtaact

SEQ ID NO: 47728 - DNA, 15 bp, Homo sapiens
caagaagagtaactc

SEQ ID NO: 47729 - DNA, 15 bp, Homo sapiens
aagaagagtaactca

SEQ ID NO: 47730 - DNA, 15 bp, Homo sapiens
agaagagtaactcaa

SEQ ID NO: 47731 - DNA, 15 bp, Homo sapiens
gaagagtaactcaaa

SEQ ID NO: 47732 - DNA, 15 bp, Homo sapiens
aagagtaactcaaag

SEQ ID NO: 47733 - DNA, 15 bp, Homo sapiens
agagtaactcaaaga

SEQ ID NO: 47734 - DNA, 15 bp, Homo sapiens
gagtaactcaaagac

SEQ ID NO: 47735 - DNA, 15 bp, Homo sapiens
agtaactcaaagaca

SEQ ID NO: 47736 - DNA, 15 bp, Homo sapiens
gtaactcaaagacac

SEQ ID NO: 47737 - DNA, 15 bp, Homo sapiens
taactcaaagacaca

SEQ ID NO: 47738 - DNA, 15 bp, Homo sapiens
aactcaaagacacat

SEQ ID NO: 47739 - DNA, 15 bp, Homo sapiens
actcaaagacacata

SEQ ID NO: 47740 - DNA, 15 bp, Homo sapiens
ctcaaagacacataa

SEQ ID NO: 47741 - DNA, 15 bp, Homo sapiens
tcaaagacacataat

SEQ ID NO: 47742 - DNA, 15 bp, Homo sapiens
caaagacacataatt

SEQ ID NO: 47743 - DNA, 15 bp, Homo sapiens
aaagacacataattg

SEQ ID NO: 47744 - DNA, 15 bp, Homo sapiens
aagacacataattgt

SEQ ID NO: 47745 - DNA, 15 bp, Homo sapiens
agacacataattgtc

SEQ ID NO: 47746 - DNA, 15 bp, Homo sapiens
gacacataattgtca

SEQ ID NO: 47747 - DNA, 15 bp, Homo sapiens
acacataattgtcag

SEQ ID NO: 47748 - DNA, 15 bp, Homo sapiens
cacataattgtcaga

SEQ ID NO: 47749 - DNA, 15 bp, Homo sapiens
acataattgtcagat

SEQ ID NO: 47750 - DNA, 15 bp, Homo sapiens
cataattgtcagatt

SEQ ID NO: 47751 - DNA, 15 bp, Homo sapiens
ataattgtcagattc

SEQ ID NO: 47752 - DNA, 15 bp, Homo sapiens
taattgtcagattca

SEQ ID NO: 47753 - DNA, 15 bp, Homo sapiens
aattgtcagattcac

SEQ ID NO: 47754 - DNA, 15 bp, Homo sapiens
attgtcagattcacc

SEQ ID NO: 47755 - DNA, 15 bp, Homo sapiens
ttgtcagattcacca

SEQ ID NO: 47756 - DNA, 15 bp, Homo sapiens
tgtcagattcaccaa

SEQ ID NO: 47757 - DNA, 15 bp, Homo sapiens
gtcagattcaccaaa

SEQ ID NO: 47758 - DNA, 15 bp, Homo sapiens
tcagattcaccaaag

SEQ ID NO: 47759 - DNA, 15 bp, Homo sapiens
cagattcaccaaagt

SEQ ID NO: 47760 - DNA, 15 bp, Homo sapiens
agattcaccaaagtt

SEQ ID NO: 47761 - DNA, 15 bp, Homo sapiens
gattcaccaaagttg

SEQ ID NO: 47762 - DNA, 15 bp, Homo sapiens
attcaccaaagttga

SEQ ID NO: 47763 - DNA, 15 bp, Homo sapiens
ttcaccaaagttgaa

SEQ ID NO: 47764 - DNA, 15 bp, Homo sapiens
tcaccaaagttgaaa

SEQ ID NO: 47765 - DNA, 15 bp, Homo sapiens
caccaaagttgaaat

SEQ ID NO: 47766 - DNA, 15 bp, Homo sapiens
accaaagttgaaatg

SEQ ID NO: 47767 - DNA, 15 bp, Homo sapiens
ccaaagttgaaatga

SEQ ID NO: 47768 - DNA, 15 bp, Homo sapiens
caaagttgaaatgaa

SEQ ID NO: 47769 - DNA, 15 bp, Homo sapiens
aaagttgaaatgaag

SEQ ID NO: 47770 - DNA, 15 bp, Homo sapiens
aagttgaaatgaagg

SEQ ID NO: 47771 - DNA, 15 bp, Homo sapiens
agttgaaatgaagga

SEQ ID NO: 47772 - DNA, 15 bp, Homo sapiens
gttgaaatgaaggaa

SEQ ID NO: 47773 - DNA, 15 bp, Homo sapiens
ttgaaatgaaggaaa

SEQ ID NO: 47774 - DNA, 15 bp, Homo sapiens
tgaaatgaaggaaaa

SEQ ID NO: 47775 - DNA, 15 bp, Homo sapiens
gaaatgaaggaaaaa

SEQ ID NO: 47776 - DNA, 15 bp, Homo sapiens
aaatgaaggaaaaaa

SEQ ID NO: 47777 - DNA, 15 bp, Homo sapiens
aatgaaggaaaaaac

SEQ ID NO: 47778 - DNA, 15 bp, Homo sapiens
atgaaggaaaaaaca

SEQ ID NO: 47779 - DNA, 15 bp, Homo sapiens
tgaaggaaaaaacat

SEQ ID NO: 47780 - DNA, 15 bp, Homo sapiens
gaaggaaaaaacatt

SEQ ID NO: 47781 - DNA, 15 bp, Homo sapiens
aaggaaaaaacatta

SEQ ID NO: 47782 - DNA, 15 bp, Homo sapiens
aggaaaaaacattaa

SEQ ID NO: 47783 - DNA, 15 bp, Homo sapiens
ggaaaaaacattaag

SEQ ID NO: 47784 - DNA, 15 bp, Homo sapiens
gaaaaaacattaagt

SEQ ID NO: 47785 - DNA, 15 bp, Homo sapiens
aaaaaacattaagtg

SEQ ID NO: 47786 - DNA, 15 bp, Homo sapiens
aaaaacattaagtgc

SEQ ID NO: 47787 - DNA, 15 bp, Homo sapiens
aaaacattaagtgca

SEQ ID NO: 47788 - DNA, 15 bp, Homo sapiens
aaacattaagtgcag

SEQ ID NO: 47789 - DNA, 15 bp, Homo sapiens
aacattaagtgcagc

SEQ ID NO: 47790 - DNA, 15 bp, Homo sapiens
acattaagtgcagcg

SEQ ID NO: 47791 - DNA, 15 bp, Homo sapiens
cattaagtgcagcga

SEQ ID NO: 47792 - DNA, 15 bp, Homo sapiens
attaagtgcagcgag

SEQ ID NO: 47793 - DNA, 15 bp, Homo sapiens
ttaagtgcagcgaga

SEQ ID NO: 47794 - DNA, 15 bp, Homo sapiens
taagtgcagcgagag

SEQ ID NO: 47795 - DNA, 15 bp, Homo sapiens
aagtgcagcgagaga

SEQ ID NO: 47796 - DNA, 15 bp, Homo sapiens
agtgcagcgagagag

SEQ ID NO: 47797 - DNA, 15 bp, Homo sapiens
gtgcagcgagagaga

SEQ ID NO: 47798 - DNA, 15 bp, Homo sapiens
tgcagcgagagagaa

SEQ ID NO: 47799 - DNA, 15 bp, Homo sapiens
gcagcgagagagaaa

SEQ ID NO: 47800 - DNA, 15 bp, Homo sapiens
cagcgagagagaaag

SEQ ID NO: 47801 - DNA, 15 bp, Homo sapiens
agcgagagagaaagg

SEQ ID NO: 47802 - DNA, 15 bp, Homo sapiens
gcgagagagaaaggg

SEQ ID NO: 47803 - DNA, 15 bp, Homo sapiens
cgagagagaaagggc

SEQ ID NO: 47804 - DNA, 15 bp, Homo sapiens
gagagagaaagggca

SEQ ID NO: 47805 - DNA, 15 bp, Homo sapiens
agagagaaagggcag

SEQ ID NO: 47806 - DNA, 15 bp, Homo sapiens
gagagaaagggcagg

SEQ ID NO: 47807 - DNA, 15 bp, Homo sapiens
agagaaagggcaggt

SEQ ID NO: 47808 - DNA, 15 bp, Homo sapiens
gagaaagggcaggtt

SEQ ID NO: 47809 - DNA, 15 bp, Homo sapiens
agaaagggcaggtta

SEQ ID NO: 47810 - DNA, 15 bp, Homo sapiens
gaaagggcaggttac

SEQ ID NO: 47811 - DNA, 15 bp, Homo sapiens
aaagggcaggttacc

SEQ ID NO: 47812 - DNA, 15 bp, Homo sapiens
aagggcaggttaccc

SEQ ID NO: 47813 - DNA, 15 bp, Homo sapiens
agggcaggttaccca

SEQ ID NO: 47814 - DNA, 15 bp, Homo sapiens
gggcaggttacccac

SEQ ID NO: 47815 - DNA, 15 bp, Homo sapiens
ggcaggttacccaca

SEQ ID NO: 47816 - DNA, 15 bp, Homo sapiens
gcaggttacccacaa

SEQ ID NO: 47817 - DNA, 15 bp, Homo sapiens
caggttacccacaaa

SEQ ID NO: 47818 - DNA, 15 bp, Homo sapiens
aggttacccacaaag

SEQ ID NO: 47819 - DNA, 15 bp, Homo sapiens
ggttacccacaaagg

SEQ ID NO: 47820 - DNA, 15 bp, Homo sapiens
gttacccacaaaggg

SEQ ID NO: 47821 - DNA, 15 bp, Homo sapiens
ttacccacaaaggga

SEQ ID NO: 47822 - DNA, 15 bp, Homo sapiens
tacccacaaagggaa

SEQ ID NO: 47823 - DNA, 15 bp, Homo sapiens
acccacaaagggaag

SEQ ID NO: 47824 - DNA, 15 bp, Homo sapiens
cccacaaagggaagt

SEQ ID NO: 47825 - DNA, 15 bp, Homo sapiens
ccacaaagggaagtc

SEQ ID NO: 47826 - DNA, 15 bp, Homo sapiens
cacaaagggaagtcc

SEQ ID NO: 47827 - DNA, 15 bp, Homo sapiens
acaaagggaagtcca

SEQ ID NO: 47828 - DNA, 15 bp, Homo sapiens
caaagggaagtccat

SEQ ID NO: 47829 - DNA, 15 bp, Homo sapiens
aaagggaagtccatc

SEQ ID NO: 47830 - DNA, 15 bp, Homo sapiens
aagggaagtccatca

SEQ ID NO: 47831 - DNA, 15 bp, Homo sapiens
agggaagtccatcag

SEQ ID NO: 47832 - DNA, 15 bp, Homo sapiens
gggaagtccatcaga

SEQ ID NO: 47833 - DNA, 15 bp, Homo sapiens
ggaagtccatcagac

SEQ ID NO: 47834 - DNA, 15 bp, Homo sapiens
gaagtccatcagact

SEQ ID NO: 47835 - DNA, 15 bp, Homo sapiens
aagtccatcagacta

SEQ ID NO: 47836 - DNA, 15 bp, Homo sapiens
agtccatcagactaa

SEQ ID NO: 47837 - DNA, 15 bp, Homo sapiens
gtccatcagactaac

SEQ ID NO: 47838 - DNA, 15 bp, Homo sapiens
tccatcagactaaca

SEQ ID NO: 47839 - DNA, 15 bp, Homo sapiens
ccatcagactaacag

SEQ ID NO: 47840 - DNA, 15 bp, Homo sapiens
catcagactaacagc

SEQ ID NO: 47841 - DNA, 15 bp, Homo sapiens
atcagactaacagca

SEQ ID NO: 47842 - DNA, 15 bp, Homo sapiens
tcagactaacagcat

SEQ ID NO: 47843 - DNA, 15 bp, Homo sapiens
cagactaacagcatc

SEQ ID NO: 47844 - DNA, 15 bp, Homo sapiens
agactaacagcatct

SEQ ID NO: 47845 - DNA, 15 bp, Homo sapiens
gactaacagcatctt

SEQ ID NO: 47846 - DNA, 15 bp, Homo sapiens
actaacagcatcttt

SEQ ID NO: 47847 - DNA, 15 bp, Homo sapiens
ctaacagcatctttc

SEQ ID NO: 47848 - DNA, 15 bp, Homo sapiens
taacagcatctttcg

SEQ ID NO: 47849 - DNA, 15 bp, Homo sapiens
aacagcatctttcgg

SEQ ID NO: 47850 - DNA, 15 bp, Homo sapiens
acagcatctttcggc

SEQ ID NO: 47851 - DNA, 15 bp, Homo sapiens
cagcatctttcggca

SEQ ID NO: 47852 - DNA, 15 bp, Homo sapiens
agcatctttcggcag

SEQ ID NO: 47853 - DNA, 15 bp, Homo sapiens
gcatctttcggcaga

SEQ ID NO: 47854 - DNA, 15 bp, Homo sapiens
catctttcggcagaa

SEQ ID NO: 47855 - DNA, 15 bp, Homo sapiens
atctttcggcagaaa

SEQ ID NO: 47856 - DNA, 15 bp, Homo sapiens
tctttcggcagaaac

SEQ ID NO: 47857 - DNA, 15 bp, Homo sapiens
ctttcggcagaaact

SEQ ID NO: 47858 - DNA, 15 bp, Homo sapiens
tttcggcagaaactc

SEQ ID NO: 47859 - DNA, 15 bp, Homo sapiens
ttcggcagaaactct

SEQ ID NO: 47860 - DNA, 15 bp, Homo sapiens
tcggcagaaactcta

SEQ ID NO: 47861 - DNA, 15 bp, Homo sapiens
cggcagaaactctac

SEQ ID NO: 47862 - DNA, 15 bp, Homo sapiens
ggcagaaactctaca

SEQ ID NO: 47863 - DNA, 15 bp, Homo sapiens
gcagaaactctacaa

SEQ ID NO: 47864 - DNA, 15 bp, Homo sapiens
cagaaactctacaag

SEQ ID NO: 47865 - DNA, 15 bp, Homo sapiens
agaaactctacaagc

SEQ ID NO: 47866 - DNA, 15 bp, Homo sapiens
gaaactctacaagcc

SEQ ID NO: 47867 - DNA, 15 bp, Homo sapiens
aaactctacaagcca

SEQ ID NO: 47868 - DNA, 15 bp, Homo sapiens
aactctacaagccag

SEQ ID NO: 47869 - DNA, 15 bp, Homo sapiens
actctacaagccaga

SEQ ID NO: 47870 - DNA, 15 bp, Homo sapiens
ctctacaagccagaa

SEQ ID NO: 47871 - DNA, 15 bp, Homo sapiens
tctacaagccagaag

SEQ ID NO: 47872 - DNA, 15 bp, Homo sapiens
ctacaagccagaaga

SEQ ID NO: 47873 - DNA, 15 bp, Homo sapiens
tacaagccagaagag

SEQ ID NO: 47874 - DNA, 15 bp, Homo sapiens
acaagccagaagaga

SEQ ID NO: 47875 - DNA, 15 bp, Homo sapiens
caagccagaagagag

SEQ ID NO: 47876 - DNA, 15 bp, Homo sapiens
aagccagaagagagt

SEQ ID NO: 47877 - DNA, 15 bp, Homo sapiens
agccagaagagagtg

SEQ ID NO: 47878 - DNA, 15 bp, Homo sapiens
gccagaagagagtgg

SEQ ID NO: 47879 - DNA, 15 bp, Homo sapiens
ccagaagagagtggg

SEQ ID NO: 47880 - DNA, 15 bp, Homo sapiens
cagaagagagtgggg

SEQ ID NO: 47881 - DNA, 15 bp, Homo sapiens
agaagagagtggggg

SEQ ID NO: 47882 - DNA, 15 bp, Homo sapiens
gaagagagtgggggc

SEQ ID NO: 47883 - DNA, 15 bp, Homo sapiens
aagagagtgggggcc

SEQ ID NO: 47884 - DNA, 15 bp, Homo sapiens
agagagtgggggcca

SEQ ID NO: 47885 - DNA, 15 bp, Homo sapiens
gagagtgggggccaa

SEQ ID NO: 47886 - DNA, 15 bp, Homo sapiens
agagtgggggccaat

SEQ ID NO: 47887 - DNA, 15 bp, Homo sapiens
gagtgggggccaata

SEQ ID NO: 47888 - DNA, 15 bp, Homo sapiens
agtgggggccaatat

SEQ ID NO: 47889 - DNA, 15 bp, Homo sapiens
gtgggggccaatatt

SEQ ID NO: 47890 - DNA, 15 bp, Homo sapiens
tgggggccaatattc

SEQ ID NO: 47891 - DNA, 15 bp, Homo sapiens
gggggccaatattca

SEQ ID NO: 47892 - DNA, 15 bp, Homo sapiens
ggggccaatattcaa

SEQ ID NO: 47893 - DNA, 15 bp, Homo sapiens
gggccaatattcaac

SEQ ID NO: 47894 - DNA, 15 bp, Homo sapiens
ggccaatattcaaca

SEQ ID NO: 47895 - DNA, 15 bp, Homo sapiens
gccaatattcaacat

SEQ ID NO: 47896 - DNA, 15 bp, Homo sapiens
ccaatattcaacatt

SEQ ID NO: 47897 - DNA, 15 bp, Homo sapiens
caatattcaacattc

SEQ ID NO: 47898 - DNA, 15 bp, Homo sapiens
aatattcaacattct

SEQ ID NO: 47899 - DNA, 15 bp, Homo sapiens
atattcaacattctt

SEQ ID NO: 47900 - DNA, 15 bp, Homo sapiens
tattcaacattctta

SEQ ID NO: 47901 - DNA, 15 bp, Homo sapiens
attcaacattcttaa

SEQ ID NO: 47902 - DNA, 15 bp, Homo sapiens
ttcaacattcttaaa

SEQ ID NO: 47903 - DNA, 15 bp, Homo sapiens
tcaacattcttaaag

SEQ ID NO: 47904 - DNA, 15 bp, Homo sapiens
caacattcttaaaga

SEQ ID NO: 47905 - DNA, 15 bp, Homo sapiens
aacattcttaaagaa

SEQ ID NO: 47906 - DNA, 15 bp, Homo sapiens
acattcttaaagaaa

SEQ ID NO: 47907 - DNA, 15 bp, Homo sapiens
cattcttaaagaaaa

SEQ ID NO: 47908 - DNA, 15 bp, Homo sapiens
attcttaaagaaaag

SEQ ID NO: 47909 - DNA, 15 bp, Homo sapiens
ttcttaaagaaaaga

SEQ ID NO: 47910 - DNA, 15 bp, Homo sapiens
tcttaaagaaaagaa

SEQ ID NO: 47911 - DNA, 15 bp, Homo sapiens
cttaaagaaaagaat

SEQ ID NO: 47912 - DNA, 15 bp, Homo sapiens
ttaaagaaaagaatt

SEQ ID NO: 47913 - DNA, 15 bp, Homo sapiens
taaagaaaagaattt

SEQ ID NO: 47914 - DNA, 15 bp, Homo sapiens
aaagaaaagaatttt

SEQ ID NO: 47915 - DNA, 15 bp, Homo sapiens
aagaaaagaattttc

SEQ ID NO: 47916 - DNA, 15 bp, Homo sapiens
agaaaagaattttca

SEQ ID NO: 47917 - DNA, 15 bp, Homo sapiens
gaaaagaattttcaa

SEQ ID NO: 47918 - DNA, 15 bp, Homo sapiens
aaaagaattttcaac

SEQ ID NO: 47919 - DNA, 15 bp, Homo sapiens
aaagaattttcaacc

SEQ ID NO: 47920 - DNA, 15 bp, Homo sapiens
aagaattttcaaccc

SEQ ID NO: 47921 - DNA, 15 bp, Homo sapiens
agaattttcaaccca

SEQ ID NO: 47922 - DNA, 15 bp, Homo sapiens
gaattttcaacccag

SEQ ID NO: 47923 - DNA, 15 bp, Homo sapiens
aattttcaacccaga

SEQ ID NO: 47924 - DNA, 15 bp, Homo sapiens
attttcaacccagaa

SEQ ID NO: 47925 - DNA, 15 bp, Homo sapiens
ttttcaacccagaat

SEQ ID NO: 47926 - DNA, 15 bp, Homo sapiens
tttcaacccagaatt

SEQ ID NO: 47927 - DNA, 15 bp, Homo sapiens
ttcaacccagaattt

SEQ ID NO: 47928 - DNA, 15 bp, Homo sapiens
tcaacccagaatttc

SEQ ID NO: 47929 - DNA, 15 bp, Homo sapiens
caacccagaatttca

SEQ ID NO: 47930 - DNA, 15 bp, Homo sapiens
aacccagaatttcat

SEQ ID NO: 47931 - DNA, 15 bp, Homo sapiens
acccagaatttcata

SEQ ID NO: 47932 - DNA, 15 bp, Homo sapiens
cccagaatttcatat

SEQ ID NO: 47933 - DNA, 15 bp, Homo sapiens
ccagaatttcatatc

SEQ ID NO: 47934 - DNA, 15 bp, Homo sapiens
cagaatttcatatcc

SEQ ID NO: 47935 - DNA, 15 bp, Homo sapiens
agaatttcatatcca

SEQ ID NO: 47936 - DNA, 15 bp, Homo sapiens
gaatttcatatccag

SEQ ID NO: 47937 - DNA, 15 bp, Homo sapiens
aatttcatatccagc

SEQ ID NO: 47938 - DNA, 15 bp, Homo sapiens
atttcatatccagcc

SEQ ID NO: 47939 - DNA, 15 bp, Homo sapiens
tttcatatccagcca

SEQ ID NO: 47940 - DNA, 15 bp, Homo sapiens
ttcatatccagccaa

SEQ ID NO: 47941 - DNA, 15 bp, Homo sapiens
tcatatccagccaaa

SEQ ID NO: 47942 - DNA, 15 bp, Homo sapiens
catatccagccaaac

SEQ ID NO: 47943 - DNA, 15 bp, Homo sapiens
atatccagccaaact

SEQ ID NO: 47944 - DNA, 15 bp, Homo sapiens
tatccagccaaacta

SEQ ID NO: 47945 - DNA, 15 bp, Homo sapiens
atccagccaaactaa

SEQ ID NO: 47946 - DNA, 15 bp, Homo sapiens
tccagccaaactaag

SEQ ID NO: 47947 - DNA, 15 bp, Homo sapiens
ccagccaaactaagc

SEQ ID NO: 47948 - DNA, 15 bp, Homo sapiens
cagccaaactaagct

SEQ ID NO: 47949 - DNA, 15 bp, Homo sapiens
agccaaactaagctt

SEQ ID NO: 47950 - DNA, 15 bp, Homo sapiens
gccaaactaagcttc

SEQ ID NO: 47951 - DNA, 15 bp, Homo sapiens
ccaaactaagcttca

SEQ ID NO: 47952 - DNA, 15 bp, Homo sapiens
caaactaagcttcat

SEQ ID NO: 47953 - DNA, 15 bp, Homo sapiens
aaactaagcttcata

SEQ ID NO: 47954 - DNA, 15 bp, Homo sapiens
aactaagcttcataa

SEQ ID NO: 47955 - DNA, 15 bp, Homo sapiens
actaagcttcataag

SEQ ID NO: 47956 - DNA, 15 bp, Homo sapiens
ctaagcttcataagt

SEQ ID NO: 47957 - DNA, 15 bp, Homo sapiens
taagcttcataagtg

SEQ ID NO: 47958 - DNA, 15 bp, Homo sapiens
aagcttcataagtga

SEQ ID NO: 47959 - DNA, 15 bp, Homo sapiens
agcttcataagtgaa

SEQ ID NO: 47960 - DNA, 15 bp, Homo sapiens
gcttcataagtgaag

SEQ ID NO: 47961 - DNA, 15 bp, Homo sapiens
cttcataagtgaagg

SEQ ID NO: 47962 - DNA, 15 bp, Homo sapiens
ttcataagtgaagga

SEQ ID NO: 47963 - DNA, 15 bp, Homo sapiens
tcataagtgaaggag

SEQ ID NO: 47964 - DNA, 15 bp, Homo sapiens
cataagtgaaggaga

SEQ ID NO: 47965 - DNA, 15 bp, Homo sapiens
ataagtgaaggagaa

SEQ ID NO: 47966 - DNA, 15 bp, Homo sapiens
taagtgaaggagaaa

SEQ ID NO: 47967 - DNA, 15 bp, Homo sapiens
aagtgaaggagaaat

SEQ ID NO: 47968 - DNA, 15 bp, Homo sapiens
agtgaaggagaaata

SEQ ID NO: 47969 - DNA, 15 bp, Homo sapiens
gtgaaggagaaataa

SEQ ID NO: 47970 - DNA, 15 bp, Homo sapiens
tgaaggagaaataaa

SEQ ID NO: 47971 - DNA, 15 bp, Homo sapiens
gaaggagaaataaaa

SEQ ID NO: 47972 - DNA, 15 bp, Homo sapiens
aaggagaaataaaat

SEQ ID NO: 47973 - DNA, 15 bp, Homo sapiens
aggagaaataaaatc

SEQ ID NO: 47974 - DNA, 15 bp, Homo sapiens
ggagaaataaaatcc

SEQ ID NO: 47975 - DNA, 15 bp, Homo sapiens
gagaaataaaatcct

SEQ ID NO: 47976 - DNA, 15 bp, Homo sapiens
agaaataaaatcctt

SEQ ID NO: 47977 - DNA, 15 bp, Homo sapiens
gaaataaaatccttt

SEQ ID NO: 47978 - DNA, 15 bp, Homo sapiens
aaataaaatccttta

SEQ ID NO: 47979 - DNA, 15 bp, Homo sapiens
aataaaatcctttac

SEQ ID NO: 47980 - DNA, 15 bp, Homo sapiens
ataaaatcctttaca

SEQ ID NO: 47981 - DNA, 15 bp, Homo sapiens
taaaatcctttacag

SEQ ID NO: 47982 - DNA, 15 bp, Homo sapiens
aaaatcctttacaga

SEQ ID NO: 47983 - DNA, 15 bp, Homo sapiens
aaatcctttacagac

SEQ ID NO: 47984 - DNA, 15 bp, Homo sapiens
aatcctttacagaca

SEQ ID NO: 47985 - DNA, 15 bp, Homo sapiens
atcctttacagacaa

SEQ ID NO: 47986 - DNA, 15 bp, Homo sapiens
tcctttacagacaag

SEQ ID NO: 47987 - DNA, 15 bp, Homo sapiens
tgctagccgttgatt

SEQ ID NO: 47988 - DNA, 15 bp, Homo sapiens
gctagccgttgattc

SEQ ID NO: 47989 - DNA, 15 bp, Homo sapiens
ctagccgttgattcc

SEQ ID NO: 47990 - DNA, 15 bp, Homo sapiens
tagccgttgattcct

SEQ ID NO: 47991 - DNA, 15 bp, Homo sapiens
agccgttgattcctg

SEQ ID NO: 47992 - DNA, 15 bp, Homo sapiens
gccgttgattcctgg

SEQ ID NO: 47993 - DNA, 15 bp, Homo sapiens
ccgttgattcctggc

SEQ ID NO: 47994 - DNA, 15 bp, Homo sapiens
cgttgattcctggca

SEQ ID NO: 47995 - DNA, 15 bp, Homo sapiens
gttgattcctggcat

SEQ ID NO: 47996 - DNA, 15 bp, Homo sapiens
ttgattcctggcatg

SEQ ID NO: 47997 - DNA, 15 bp, Homo sapiens
tgattcctggcatgc

SEQ ID NO: 47998 - DNA, 15 bp, Homo sapiens
gattcctggcatgct

SEQ ID NO: 47999 - DNA, 15 bp, Homo sapiens
attcctggcatgcta

SEQ ID NO: 48000 - DNA, 15 bp, Homo sapiens
ttcctggcatgctat

SEQ ID NO: 48001 - DNA, 15 bp, Homo sapiens
tcctggcatgctatt

SEQ ID NO: 48002 - DNA, 15 bp, Homo sapiens
cctggcatgctattc

SEQ ID NO: 48003 - DNA, 15 bp, Homo sapiens
ctggcatgctattct

SEQ ID NO: 48004 - DNA, 15 bp, Homo sapiens
tggcatgctattcta

SEQ ID NO: 48005 - DNA, 15 bp, Homo sapiens
ggcatgctattctac

SEQ ID NO: 48006 - DNA, 15 bp, Homo sapiens
gcatgctattctaca

SEQ ID NO: 48007 - DNA, 15 bp, Homo sapiens
catgctattctacat

SEQ ID NO: 48008 - DNA, 15 bp, Homo sapiens
atgctattctacatt

SEQ ID NO: 48009 - DNA, 15 bp, Homo sapiens
tgctattctacattt

SEQ ID NO: 48010 - DNA, 15 bp, Homo sapiens
gctattctacatttg

SEQ ID NO: 48011 - DNA, 15 bp, Homo sapiens
ctattctacatttgg

SEQ ID NO: 48012 - DNA, 15 bp, Homo sapiens
tattctacatttggc

SEQ ID NO: 48013 - DNA, 15 bp, Homo sapiens
attctacatttggct

SEQ ID NO: 48014 - DNA, 15 bp, Homo sapiens
ttctacatttggcta

SEQ ID NO: 48015 - DNA, 15 bp, Homo sapiens
tctacatttggctac

SEQ ID NO: 48016 - DNA, 15 bp, Homo sapiens
ctacatttggctaca

SEQ ID NO: 48017 - DNA, 15 bp, Homo sapiens
tacatttggctacat

SEQ ID NO: 48018 - DNA, 15 bp, Homo sapiens
acatttggctacatt

SEQ ID NO: 48019 - DNA, 15 bp, Homo sapiens
catttggctacatta

SEQ ID NO: 48020 - DNA, 15 bp, Homo sapiens
atttggctacattac

SEQ ID NO: 48021 - DNA, 15 bp, Homo sapiens
tttggctacattaca

SEQ ID NO: 48022 - DNA, 15 bp, Homo sapiens
ttggctacattacaa

SEQ ID NO: 48023 - DNA, 15 bp, Homo sapiens
tggctacattacaac

SEQ ID NO: 48024 - DNA, 15 bp, Homo sapiens
ggctacattacaacg

SEQ ID NO: 48025 - DNA, 15 bp, Homo sapiens
gctacattacaacgt

SEQ ID NO: 48026 - DNA, 15 bp, Homo sapiens
ctacattacaacgtt

SEQ ID NO: 48027 - DNA, 15 bp, Homo sapiens
tacattacaacgtta

SEQ ID NO: 48028 - DNA, 15 bp, Homo sapiens
acattacaacgttaa

SEQ ID NO: 48029 - DNA, 15 bp, Homo sapiens
cattacaacgttaaa

SEQ ID NO: 48030 - DNA, 15 bp, Homo sapiens
attacaacgttaaaa

SEQ ID NO: 48031 - DNA, 15 bp, Homo sapiens
ttacaacgttaaaag

SEQ ID NO: 48032 - DNA, 15 bp, Homo sapiens
tacaacgttaaaagg

SEQ ID NO: 48033 - DNA, 15 bp, Homo sapiens
acaacgttaaaagga

SEQ ID NO: 48034 - DNA, 15 bp, Homo sapiens
caacgttaaaaggat

SEQ ID NO: 48035 - DNA, 15 bp, Homo sapiens
aacgttaaaaggatt

SEQ ID NO: 48036 - DNA, 15 bp, Homo sapiens
acgttaaaaggattt

SEQ ID NO: 48037 - DNA, 15 bp, Homo sapiens
cgttaaaaggattta

SEQ ID NO: 48038 - DNA, 15 bp, Homo sapiens
gttaaaaggatttag

SEQ ID NO: 48039 - DNA, 15 bp, Homo sapiens
ttaaaaggatttagt

SEQ ID NO: 48040 - DNA, 15 bp, Homo sapiens
taaaaggatttagtg

SEQ ID NO: 48041 - DNA, 15 bp, Homo sapiens
aaaaggatttagtgc

SEQ ID NO: 48042 - DNA, 15 bp, Homo sapiens
aaaggatttagtgca

SEQ ID NO: 48043 - DNA, 15 bp, Homo sapiens
aaggatttagtgcat

SEQ ID NO: 48044 - DNA, 15 bp, Homo sapiens
aggatttagtgcata

SEQ ID NO: 48045 - DNA, 15 bp, Homo sapiens
ggatttagtgcatat

SEQ ID NO: 48046 - DNA, 15 bp, Homo sapiens
gatttagtgcatata

SEQ ID NO: 48047 - DNA, 15 bp, Homo sapiens
atttagtgcatatat

SEQ ID NO: 48048 - DNA, 15 bp, Homo sapiens
tttagtgcatatatc

SEQ ID NO: 48049 - DNA, 15 bp, Homo sapiens
ttagtgcatatatca

SEQ ID NO: 48050 - DNA, 15 bp, Homo sapiens
tagtgcatatatcaa

SEQ ID NO: 48051 - DNA, 15 bp, Homo sapiens
agtgcatatatcaaa

SEQ ID NO: 48052 - DNA, 15 bp, Homo sapiens
gtgcatatatcaaat

SEQ ID NO: 48053 - DNA, 15 bp, Homo sapiens
tgcatatatcaaatt

SEQ ID NO: 48054 - DNA, 15 bp, Homo sapiens
gcatatatcaaattg

SEQ ID NO: 48055 - DNA, 15 bp, Homo sapiens
catatatcaaattgt

SEQ ID NO: 48056 - DNA, 15 bp, Homo sapiens
atatatcaaattgtg

SEQ ID NO: 48057 - DNA, 15 bp, Homo sapiens
tatatcaaattgtgg

SEQ ID NO: 48058 - DNA, 15 bp, Homo sapiens
atatcaaattgtgga

SEQ ID NO: 48059 - DNA, 15 bp, Homo sapiens
tatcaaattgtggat

SEQ ID NO: 48060 - DNA, 15 bp, Homo sapiens
atcaaattgtggatc

SEQ ID NO: 48061 - DNA, 15 bp, Homo sapiens
tcaaattgtggatct

SEQ ID NO: 48062 - DNA, 15 bp, Homo sapiens
caaattgtggatctg

SEQ ID NO: 48063 - DNA, 15 bp, Homo sapiens
aaattgtggatctgc

SEQ ID NO: 48064 - DNA, 15 bp, Homo sapiens
aattgtggatctgct

SEQ ID NO: 48065 - DNA, 15 bp, Homo sapiens
attgtggatctgctt

SEQ ID NO: 48066 - DNA, 15 bp, Homo sapiens
ttgtggatctgcttg

SEQ ID NO: 48067 - DNA, 15 bp, Homo sapiens
tgtggatctgcttgt

SEQ ID NO: 48068 - DNA, 15 bp, Homo sapiens
gtggatctgcttgtt

SEQ ID NO: 48069 - DNA, 15 bp, Homo sapiens
tggatctgcttgttt

SEQ ID NO: 48070 - DNA, 15 bp, Homo sapiens
ggatctgcttgtttt

SEQ ID NO: 48071 - DNA, 15 bp, Homo sapiens
gatctgcttgtttta

SEQ ID NO: 48072 - DNA, 15 bp, Homo sapiens
atctgcttgttttaa

SEQ ID NO: 48073 - DNA, 15 bp, Homo sapiens
tctgcttgttttaaa

SEQ ID NO: 48074 - DNA, 15 bp, Homo sapiens
ctgcttgttttaaaa

SEQ ID NO: 48075 - DNA, 15 bp, Homo sapiens
tgcttgttttaaaat

SEQ ID NO: 48076 - DNA, 15 bp, Homo sapiens
gcttgttttaaaatt

SEQ ID NO: 48077 - DNA, 15 bp, Homo sapiens
cttgttttaaaattt

SEQ ID NO: 48078 - DNA, 15 bp, Homo sapiens
ttgttttaaaatttc

SEQ ID NO: 48079 - DNA, 15 bp, Homo sapiens
tgttttaaaatttca

SEQ ID NO: 48080 - DNA, 15 bp, Homo sapiens
gttttaaaatttcat

SEQ ID NO: 48081 - DNA, 15 bp, Homo sapiens
ttttaaaatttcatc

SEQ ID NO: 48082 - DNA, 15 bp, Homo sapiens
tttaaaatttcatct

SEQ ID NO: 48083 - DNA, 15 bp, Homo sapiens
ttaaaatttcatctg

SEQ ID NO: 48084 - DNA, 15 bp, Homo sapiens
taaaatttcatctgt

SEQ ID NO: 48085 - DNA, 15 bp, Homo sapiens
aaaatttcatctgta

SEQ ID NO: 48086 - DNA, 15 bp, Homo sapiens
aaatttcatctgtaa

SEQ ID NO: 48087 - DNA, 15 bp, Homo sapiens
aatttcatctgtaat

SEQ ID NO: 48088 - DNA, 15 bp, Homo sapiens
atttcatctgtaatt

SEQ ID NO: 48089 - DNA, 15 bp, Homo sapiens
tttcatctgtaattc

SEQ ID NO: 48090 - DNA, 15 bp, Homo sapiens
ttcatctgtaattcc

SEQ ID NO: 48091 - DNA, 15 bp, Homo sapiens
tcatctgtaattcca

SEQ ID NO: 48092 - DNA, 15 bp, Homo sapiens
catctgtaattccac

SEQ ID NO: 48093 - DNA, 15 bp, Homo sapiens
atctgtaattccaca

SEQ ID NO: 48094 - DNA, 15 bp, Homo sapiens
tctgtaattccacat

SEQ ID NO: 48095 - DNA, 15 bp, Homo sapiens
ctgtaattccacatg

SEQ ID NO: 48096 - DNA, 15 bp, Homo sapiens
tgtaattccacatgc

SEQ ID NO: 48097 - DNA, 15 bp, Homo sapiens
gtaattccacatgca

SEQ ID NO: 48098 - DNA, 15 bp, Homo sapiens
taattccacatgcaa

SEQ ID NO: 48099 - DNA, 15 bp, Homo sapiens
aattccacatgcaac

SEQ ID NO: 48100 - DNA, 15 bp, Homo sapiens
attccacatgcaacc

SEQ ID NO: 48101 - DNA, 15 bp, Homo sapiens
ttccacatgcaaccc

SEQ ID NO: 48102 - DNA, 15 bp, Homo sapiens
tccacatgcaacccc

SEQ ID NO: 48103 - DNA, 15 bp, Homo sapiens
ccacatgcaaccccc

SEQ ID NO: 48104 - DNA, 15 bp, Homo sapiens
cacatgcaaccccca

SEQ ID NO: 48105 - DNA, 15 bp, Homo sapiens
acatgcaacccccac

SEQ ID NO: 48106 - DNA, 15 bp, Homo sapiens
catgcaacccccacc

SEQ ID NO: 48107 - DNA, 15 bp, Homo sapiens
atgcaacccccaccc

SEQ ID NO: 48108 - DNA, 15 bp, Homo sapiens
tgcaacccccacccc

SEQ ID NO: 48109 - DNA, 15 bp, Homo sapiens
gcaacccccaccccc

SEQ ID NO: 48110 - DNA, 15 bp, Homo sapiens
caacccccaccccca

SEQ ID NO: 48111 - DNA, 15 bp, Homo sapiens
aacccccacccccat

SEQ ID NO: 48112 - DNA, 15 bp, Homo sapiens
acccccacccccata

SEQ ID NO: 48113 - DNA, 15 bp, Homo sapiens
cccccacccccatac

SEQ ID NO: 48114 - DNA, 15 bp, Homo sapiens
ccccacccccataca

SEQ ID NO: 48115 - DNA, 15 bp, Homo sapiens
cccacccccatacac

SEQ ID NO: 48116 - DNA, 15 bp, Homo sapiens
ccacccccatacaca

SEQ ID NO: 48117 - DNA, 15 bp, Homo sapiens
cacccccatacacac

SEQ ID NO: 48118 - DNA, 15 bp, Homo sapiens
acccccatacacact

SEQ ID NO: 48119 - DNA, 15 bp, Homo sapiens
cccccatacacactc

SEQ ID NO: 48120 - DNA, 15 bp, Homo sapiens
ccccatacacactca

SEQ ID NO: 48121 - DNA, 15 bp, Homo sapiens
cccatacacactcac

SEQ ID NO: 48122 - DNA, 15 bp, Homo sapiens
ccatacacactcaca

SEQ ID NO: 48123 - DNA, 15 bp, Homo sapiens
catacacactcacaa

SEQ ID NO: 48124 - DNA, 15 bp, Homo sapiens
atacacactcacaag

SEQ ID NO: 48125 - DNA, 15 bp, Homo sapiens
tacacactcacaaga

SEQ ID NO: 48126 - DNA, 15 bp, Homo sapiens
acacactcacaagat

SEQ ID NO: 48127 - DNA, 15 bp, Homo sapiens
cacactcacaagatc

SEQ ID NO: 48128 - DNA, 15 bp, Homo sapiens
acactcacaagatct

SEQ ID NO: 48129 - DNA, 15 bp, Homo sapiens
cactcacaagatctg

SEQ ID NO: 48130 - DNA, 15 bp, Homo sapiens
actcacaagatctga

SEQ ID NO: 48131 - DNA, 15 bp, Homo sapiens
ctcacaagatctgaa

SEQ ID NO: 48132 - DNA, 15 bp, Homo sapiens
tcacaagatctgaat

SEQ ID NO: 48133 - DNA, 15 bp, Homo sapiens
cacaagatctgaata

SEQ ID NO: 48134 - DNA, 15 bp, Homo sapiens
acaagatctgaatat

SEQ ID NO: 48135 - DNA, 15 bp, Homo sapiens
caagatctgaatatg

SEQ ID NO: 48136 - DNA, 15 bp, Homo sapiens
aagatctgaatatgg

SEQ ID NO: 48137 - DNA, 15 bp, Homo sapiens
agatctgaatatggt

SEQ ID NO: 48138 - DNA, 15 bp, Homo sapiens
gatctgaatatggta

SEQ ID NO: 48139 - DNA, 15 bp, Homo sapiens
atctgaatatggtaa

SEQ ID NO: 48140 - DNA, 15 bp, Homo sapiens
tctgaatatggtaac

SEQ ID NO: 48141 - DNA, 15 bp, Homo sapiens
ctgaatatggtaaca

SEQ ID NO: 48142 - DNA, 15 bp, Homo sapiens
tgaatatggtaacaa

SEQ ID NO: 48143 - DNA, 15 bp, Homo sapiens
gaatatggtaacaag

SEQ ID NO: 48144 - DNA, 15 bp, Homo sapiens
aatatggtaacaagg

SEQ ID NO: 48145 - DNA, 15 bp, Homo sapiens
atatggtaacaagga

SEQ ID NO: 48146 - DNA, 15 bp, Homo sapiens
tatggtaacaaggaa

SEQ ID NO: 48147 - DNA, 15 bp, Homo sapiens
atggtaacaaggaaa

SEQ ID NO: 48148 - DNA, 15 bp, Homo sapiens
tggtaacaaggaaat

SEQ ID NO: 48149 - DNA, 15 bp, Homo sapiens
ggtaacaaggaaatc

SEQ ID NO: 48150 - DNA, 15 bp, Homo sapiens
gtaacaaggaaatcc

SEQ ID NO: 48151 - DNA, 15 bp, Homo sapiens
taacaaggaaatcct

SEQ ID NO: 48152 - DNA, 15 bp, Homo sapiens
aacaaggaaatccta

SEQ ID NO: 48153 - DNA, 15 bp, Homo sapiens
acaaggaaatcctag

SEQ ID NO: 48154 - DNA, 15 bp, Homo sapiens
caaggaaatcctagt

SEQ ID NO: 48155 - DNA, 15 bp, Homo sapiens
aaggaaatcctagta

SEQ ID NO: 48156 - DNA, 15 bp, Homo sapiens
aggaaatcctagtaa

SEQ ID NO: 48157 - DNA, 15 bp, Homo sapiens
ggaaatcctagtaac

SEQ ID NO: 48158 - DNA, 15 bp, Homo sapiens
gaaatcctagtaact

SEQ ID NO: 48159 - DNA, 15 bp, Homo sapiens
aaatcctagtaactg

SEQ ID NO: 48160 - DNA, 15 bp, Homo sapiens
aatcctagtaactgt

SEQ ID NO: 48161 - DNA, 15 bp, Homo sapiens
atcctagtaactgta

SEQ ID NO: 48162 - DNA, 15 bp, Homo sapiens
tcctagtaactgtag

SEQ ID NO: 48163 - DNA, 15 bp, Homo sapiens
cctagtaactgtagc

SEQ ID NO: 48164 - DNA, 15 bp, Homo sapiens
ctagtaactgtagcg

SEQ ID NO: 48165 - DNA, 15 bp, Homo sapiens
tagtaactgtagcgt

SEQ ID NO: 48166 - DNA, 15 bp, Homo sapiens
agtaactgtagcgtt

SEQ ID NO: 48167 - DNA, 15 bp, Homo sapiens
gtaactgtagcgttg

SEQ ID NO: 48168 - DNA, 15 bp, Homo sapiens
taactgtagcgttgg

SEQ ID NO: 48169 - DNA, 15 bp, Homo sapiens
aactgtagcgttgga

SEQ ID NO: 48170 - DNA, 15 bp, Homo sapiens
actgtagcgttggaa

SEQ ID NO: 48171 - DNA, 15 bp, Homo sapiens
ctgtagcgttggaaa

SEQ ID NO: 48172 - DNA, 15 bp, Homo sapiens
tgtagcgttggaaaa

SEQ ID NO: 48173 - DNA, 15 bp, Homo sapiens
gtagcgttggaaaaa

SEQ ID NO: 48174 - DNA, 15 bp, Homo sapiens
tagcgttggaaaaat

SEQ ID NO: 48175 - DNA, 15 bp, Homo sapiens
agcgttggaaaaatg

SEQ ID NO: 48176 - DNA, 15 bp, Homo sapiens
gcgttggaaaaatgg

SEQ ID NO: 48177 - DNA, 15 bp, Homo sapiens
cgttggaaaaatggt

SEQ ID NO: 48178 - DNA, 15 bp, Homo sapiens
gttggaaaaatggtt

SEQ ID NO: 48179 - DNA, 15 bp, Homo sapiens
ttggaaaaatggttc

SEQ ID NO: 48180 - DNA, 15 bp, Homo sapiens
tggaaaaatggttca

SEQ ID NO: 48181 - DNA, 15 bp, Homo sapiens
ggaaaaatggttcat

SEQ ID NO: 48182 - DNA, 15 bp, Homo sapiens
gaaaaatggttcata

SEQ ID NO: 48183 - DNA, 15 bp, Homo sapiens
aaaaatggttcatat

SEQ ID NO: 48184 - DNA, 15 bp, Homo sapiens
aaaatggttcatatg

SEQ ID NO: 48185 - DNA, 15 bp, Homo sapiens
aaatggttcatatgg

SEQ ID NO: 48186 - DNA, 15 bp, Homo sapiens
aatggttcatatgga

SEQ ID NO: 48187 - DNA, 15 bp, Homo sapiens
atggttcatatggaa

SEQ ID NO: 48188 - DNA, 15 bp, Homo sapiens
tggttcatatggaaa

SEQ ID NO: 48189 - DNA, 15 bp, Homo sapiens
ggttcatatggaaat

SEQ ID NO: 48190 - DNA, 15 bp, Homo sapiens
gttcatatggaaata

SEQ ID NO: 48191 - DNA, 15 bp, Homo sapiens
ttcatatggaaataa

SEQ ID NO: 48192 - DNA, 15 bp, Homo sapiens
tcatatggaaataag

SEQ ID NO: 48193 - DNA, 15 bp, Homo sapiens
catatggaaataagc

SEQ ID NO: 48194 - DNA, 15 bp, Homo sapiens
atatggaaataagcc

SEQ ID NO: 48195 - DNA, 15 bp, Homo sapiens
tatggaaataagcca

SEQ ID NO: 48196 - DNA, 15 bp, Homo sapiens
atggaaataagccat

SEQ ID NO: 48197 - DNA, 15 bp, Homo sapiens
tggaaataagccatt

SEQ ID NO: 48198 - DNA, 15 bp, Homo sapiens
ggaaataagccattt

SEQ ID NO: 48199 - DNA, 15 bp, Homo sapiens
gaaataagccatttg

SEQ ID NO: 48200 - DNA, 15 bp, Homo sapiens
aaataagccatttgg

SEQ ID NO: 48201 - DNA, 15 bp, Homo sapiens
aataagccatttggc

SEQ ID NO: 48202 - DNA, 15 bp, Homo sapiens
ataagccatttggct

SEQ ID NO: 48203 - DNA, 15 bp, Homo sapiens
taagccatttggcta

SEQ ID NO: 48204 - DNA, 15 bp, Homo sapiens
aagccatttggctag

SEQ ID NO: 48205 - DNA, 15 bp, Homo sapiens
agccatttggctagt

SEQ ID NO: 48206 - DNA, 15 bp, Homo sapiens
gccatttggctagta

SEQ ID NO: 48207 - DNA, 15 bp, Homo sapiens
ccatttggctagtaa

SEQ ID NO: 48208 - DNA, 15 bp, Homo sapiens
catttggctagtaaa

SEQ ID NO: 48209 - DNA, 15 bp, Homo sapiens
atttggctagtaaag

SEQ ID NO: 48210 - DNA, 15 bp, Homo sapiens
tttggctagtaaagc

SEQ ID NO: 48211 - DNA, 15 bp, Homo sapiens
ttggctagtaaagct

SEQ ID NO: 48212 - DNA, 15 bp, Homo sapiens
tggctagtaaagctg

SEQ ID NO: 48213 - DNA, 15 bp, Homo sapiens
ggctagtaaagctgg

SEQ ID NO: 48214 - DNA, 15 bp, Homo sapiens
gctagtaaagctggt

SEQ ID NO: 48215 - DNA, 15 bp, Homo sapiens
ctagtaaagctggtg

SEQ ID NO: 48216 - DNA, 15 bp, Homo sapiens
tagtaaagctggtga

SEQ ID NO: 48217 - DNA, 15 bp, Homo sapiens
agtaaagctggtgat

SEQ ID NO: 48218 - DNA, 15 bp, Homo sapiens
gtaaagctggtgatt

SEQ ID NO: 48219 - DNA, 15 bp, Homo sapiens
taaagctggtgattt

SEQ ID NO: 48220 - DNA, 15 bp, Homo sapiens
aaagctggtgatttt

SEQ ID NO: 48221 - DNA, 15 bp, Homo sapiens
aagctggtgattttg

SEQ ID NO: 48222 - DNA, 15 bp, Homo sapiens
agctggtgattttgt

SEQ ID NO: 48223 - DNA, 15 bp, Homo sapiens
gctggtgattttgtt

SEQ ID NO: 48224 - DNA, 15 bp, Homo sapiens
ctggtgattttgttc

SEQ ID NO: 48225 - DNA, 15 bp, Homo sapiens
tggtgattttgttct

SEQ ID NO: 48226 - DNA, 15 bp, Homo sapiens
ggtgattttgttctc

SEQ ID NO: 48227 - DNA, 15 bp, Homo sapiens
gtgattttgttctct

SEQ ID NO: 48228 - DNA, 15 bp, Homo sapiens
tgattttgttctcta

SEQ ID NO: 48229 - DNA, 15 bp, Homo sapiens
gattttgttctctag

SEQ ID NO: 48230 - DNA, 15 bp, Homo sapiens
attttgttctctagg

SEQ ID NO: 48231 - DNA, 15 bp, Homo sapiens
ttttgttctctaggt

SEQ ID NO: 48232 - DNA, 15 bp, Homo sapiens
tttgttctctaggtg

SEQ ID NO: 48233 - DNA, 15 bp, Homo sapiens
ttgttctctaggtgg

SEQ ID NO: 48234 - DNA, 15 bp, Homo sapiens
tgttctctaggtggc

SEQ ID NO: 48235 - DNA, 15 bp, Homo sapiens
gttctctaggtggca

SEQ ID NO: 48236 - DNA, 15 bp, Homo sapiens
ttctctaggtggcac

SEQ ID NO: 48237 - DNA, 15 bp, Homo sapiens
tctctaggtggcact

SEQ ID NO: 48238 - DNA, 15 bp, Homo sapiens
ctctaggtggcacta

SEQ ID NO: 48239 - DNA, 15 bp, Homo sapiens
tctaggtggcactat

SEQ ID NO: 48240 - DNA, 15 bp, Homo sapiens
ctaggtggcactatt

SEQ ID NO: 48241 - DNA, 15 bp, Homo sapiens
taggtggcactatta

SEQ ID NO: 48242 - DNA, 15 bp, Homo sapiens
aggtggcactattac

SEQ ID NO: 48243 - DNA, 15 bp, Homo sapiens
ggtggcactattact

SEQ ID NO: 48244 - DNA, 15 bp, Homo sapiens
gtggcactattactt

SEQ ID NO: 48245 - DNA, 15 bp, Homo sapiens
tggcactattacttc

SEQ ID NO: 48246 - DNA, 15 bp, Homo sapiens
ggcactattacttca

SEQ ID NO: 48247 - DNA, 15 bp, Homo sapiens
gcactattacttcaa

SEQ ID NO: 48248 - DNA, 15 bp, Homo sapiens
cactattacttcaat

SEQ ID NO: 48249 - DNA, 15 bp, Homo sapiens
actattacttcaatt

SEQ ID NO: 48250 - DNA, 15 bp, Homo sapiens
ctattacttcaattt

SEQ ID NO: 48251 - DNA, 15 bp, Homo sapiens
tattacttcaatttt

SEQ ID NO: 48252 - DNA, 15 bp, Homo sapiens
attacttcaattttt

SEQ ID NO: 48253 - DNA, 15 bp, Homo sapiens
ttacttcaatttttg

SEQ ID NO: 48254 - DNA, 15 bp, Homo sapiens
tacttcaatttttgg

SEQ ID NO: 48255 - DNA, 15 bp, Homo sapiens
acttcaatttttggt

SEQ ID NO: 48256 - DNA, 15 bp, Homo sapiens
cttcaatttttggtg

SEQ ID NO: 48257 - DNA, 15 bp, Homo sapiens
ttcaatttttggtga

SEQ ID NO: 48258 - DNA, 15 bp, Homo sapiens
tcaatttttggtgag

SEQ ID NO: 48259 - DNA, 15 bp, Homo sapiens
caatttttggtgagt

SEQ ID NO: 48260 - DNA, 15 bp, Homo sapiens
aatttttggtgagtt

SEQ ID NO: 48261 - DNA, 15 bp, Homo sapiens
atttttggtgagttg

SEQ ID NO: 48262 - DNA, 15 bp, Homo sapiens
tttttggtgagttgc

SEQ ID NO: 48263 - DNA, 15 bp, Homo sapiens
ttttggtgagttgct

SEQ ID NO: 48264 - DNA, 15 bp, Homo sapiens
tttggtgagttgctt

SEQ ID NO: 48265 - DNA, 15 bp, Homo sapiens
ttggtgagttgctta

SEQ ID NO: 48266 - DNA, 15 bp, Homo sapiens
tggtgagttgcttaa

SEQ ID NO: 48267 - DNA, 15 bp, Homo sapiens
ggtgagttgcttaaa

SEQ ID NO: 48268 - DNA, 15 bp, Homo sapiens
gtgagttgcttaaat

SEQ ID NO: 48269 - DNA, 15 bp, Homo sapiens
tgagttgcttaaatt

SEQ ID NO: 48270 - DNA, 15 bp, Homo sapiens
gagttgcttaaatta

SEQ ID NO: 48271 - DNA, 15 bp, Homo sapiens
agttgcttaaattac

SEQ ID NO: 48272 - DNA, 15 bp, Homo sapiens
gttgcttaaattact

SEQ ID NO: 48273 - DNA, 15 bp, Homo sapiens
ttgcttaaattactt

SEQ ID NO: 48274 - DNA, 15 bp, Homo sapiens
tgcttaaattacttg

SEQ ID NO: 48275 - DNA, 15 bp, Homo sapiens
gcttaaattacttgg

SEQ ID NO: 48276 - DNA, 15 bp, Homo sapiens
cttaaattacttgga

SEQ ID NO: 48277 - DNA, 15 bp, Homo sapiens
ttaaattacttggaa

SEQ ID NO: 48278 - DNA, 15 bp, Homo sapiens
taaattacttggaac

SEQ ID NO: 48279 - DNA, 15 bp, Homo sapiens
aaattacttggaact

SEQ ID NO: 48280 - DNA, 15 bp, Homo sapiens
aattacttggaactg

SEQ ID NO: 48281 - DNA, 15 bp, Homo sapiens
attacttggaactgc

SEQ ID NO: 48282 - DNA, 15 bp, Homo sapiens
ttacttggaactgcc

SEQ ID NO: 48283 - DNA, 15 bp, Homo sapiens
tacttggaactgccc

SEQ ID NO: 48284 - DNA, 15 bp, Homo sapiens
acttggaactgcccg

SEQ ID NO: 48285 - DNA, 15 bp, Homo sapiens
cttggaactgcccgt

SEQ ID NO: 48286 - DNA, 15 bp, Homo sapiens
ttggaactgcccgtt

SEQ ID NO: 48287 - DNA, 15 bp, Homo sapiens
tggaactgcccgttt

SEQ ID NO: 48288 - DNA, 15 bp, Homo sapiens
ggaactgcccgttta

SEQ ID NO: 48289 - DNA, 15 bp, Homo sapiens
gaactgcccgtttat

SEQ ID NO: 48290 - DNA, 15 bp, Homo sapiens
aactgcccgtttatt

SEQ ID NO: 48291 - DNA, 15 bp, Homo sapiens
actgcccgtttattt

SEQ ID NO: 48292 - DNA, 15 bp, Homo sapiens
ctgcccgtttatttt

SEQ ID NO: 48293 - DNA, 15 bp, Homo sapiens
tgcccgtttattttc

SEQ ID NO: 48294 - DNA, 15 bp, Homo sapiens
gcccgtttattttct

SEQ ID NO: 48295 - DNA, 15 bp, Homo sapiens
cccgtttattttctt

SEQ ID NO: 48296 - DNA, 15 bp, Homo sapiens
ccgtttattttcttt

SEQ ID NO: 48297 - DNA, 15 bp, Homo sapiens
cgtttattttctttg

SEQ ID NO: 48298 - DNA, 15 bp, Homo sapiens
gtttattttctttga

SEQ ID NO: 48299 - DNA, 15 bp, Homo sapiens
tttattttctttgaa

SEQ ID NO: 48300 - DNA, 15 bp, Homo sapiens
ttattttctttgaat

SEQ ID NO: 48301 - DNA, 15 bp, Homo sapiens
tattttctttgaatt

SEQ ID NO: 48302 - DNA, 15 bp, Homo sapiens
attttctttgaattc

SEQ ID NO: 48303 - DNA, 15 bp, Homo sapiens
ttttctttgaattcc

SEQ ID NO: 48304 - DNA, 15 bp, Homo sapiens
tttctttgaattccc

SEQ ID NO: 48305 - DNA, 15 bp, Homo sapiens
ttctttgaattccca

SEQ ID NO: 48306 - DNA, 15 bp, Homo sapiens
tctttgaattcccat

SEQ ID NO: 48307 - DNA, 15 bp, Homo sapiens
ctttgaattcccatt

SEQ ID NO: 48308 - DNA, 15 bp, Homo sapiens
tttgaattcccattt

SEQ ID NO: 48309 - DNA, 15 bp, Homo sapiens
ttgaattcccatttt

SEQ ID NO: 48310 - DNA, 15 bp, Homo sapiens
tgaattcccatttta

SEQ ID NO: 48311 - DNA, 15 bp, Homo sapiens
gaattcccattttat

SEQ ID NO: 48312 - DNA, 15 bp, Homo sapiens
aattcccattttata

SEQ ID NO: 48313 - DNA, 15 bp, Homo sapiens
attcccattttataa

SEQ ID NO: 48314 - DNA, 15 bp, Homo sapiens
ttcccattttataaa

SEQ ID NO: 48315 - DNA, 15 bp, Homo sapiens
tcccattttataaat

SEQ ID NO: 48316 - DNA, 15 bp, Homo sapiens
cccattttataaatt

SEQ ID NO: 48317 - DNA, 15 bp, Homo sapiens
ccattttataaattt

SEQ ID NO: 48318 - DNA, 15 bp, Homo sapiens
cattttataaatttt

SEQ ID NO: 48319 - DNA, 15 bp, Homo sapiens
attttataaatttta

SEQ ID NO: 48320 - DNA, 15 bp, Homo sapiens
ttttataaattttaa

SEQ ID NO: 48321 - DNA, 15 bp, Homo sapiens
tttataaattttaat

SEQ ID NO: 48322 - DNA, 15 bp, Homo sapiens
ttataaattttaatt

SEQ ID NO: 48323 - DNA, 15 bp, Homo sapiens
tataaattttaattt

SEQ ID NO: 48324 - DNA, 15 bp, Homo sapiens
ataaattttaatttt

SEQ ID NO: 48325 - DNA, 15 bp, Homo sapiens
taaattttaatttta

SEQ ID NO: 48326 - DNA, 15 bp, Homo sapiens
aaattttaattttat

SEQ ID NO: 48327 - DNA, 15 bp, Homo sapiens
aattttaattttata

SEQ ID NO: 48328 - DNA, 15 bp, Homo sapiens
attttaattttatac

SEQ ID NO: 48329 - DNA, 15 bp, Homo sapiens
ttttaattttataca

SEQ ID NO: 48330 - DNA, 15 bp, Homo sapiens
tttaattttatacaa

SEQ ID NO: 48331 - DNA, 15 bp, Homo sapiens
ttaattttatacaag

SEQ ID NO: 48332 - DNA, 15 bp, Homo sapiens
taattttatacaagc

SEQ ID NO: 48333 - DNA, 15 bp, Homo sapiens
aattttatacaagct

SEQ ID NO: 48334 - DNA, 15 bp, Homo sapiens
attttatacaagcta

SEQ ID NO: 48335 - DNA, 15 bp, Homo sapiens
ttttatacaagctag

SEQ ID NO: 48336 - DNA, 15 bp, Homo sapiens
tttatacaagctagt

SEQ ID NO: 48337 - DNA, 15 bp, Homo sapiens
ttatacaagctagtt

SEQ ID NO: 48338 - DNA, 15 bp, Homo sapiens
tatacaagctagttg

SEQ ID NO: 48339 - DNA, 15 bp, Homo sapiens
atacaagctagttgt

SEQ ID NO: 48340 - DNA, 15 bp, Homo sapiens
tacaagctagttgta

SEQ ID NO: 48341 - DNA, 15 bp, Homo sapiens
acaagctagttgtaa

SEQ ID NO: 48342 - DNA, 15 bp, Homo sapiens
caagctagttgtaat

SEQ ID NO: 48343 - DNA, 15 bp, Homo sapiens
aagctagttgtaatt

SEQ ID NO: 48344 - DNA, 15 bp, Homo sapiens
agctagttgtaatta

SEQ ID NO: 48345 - DNA, 15 bp, Homo sapiens
gctagttgtaattaa

SEQ ID NO: 48346 - DNA, 15 bp, Homo sapiens
ctagttgtaattaaa

SEQ ID NO: 48347 - DNA, 15 bp, Homo sapiens
tagttgtaattaaac

SEQ ID NO: 48348 - DNA, 15 bp, Homo sapiens
agttgtaattaaacg

SEQ ID NO: 48349 - DNA, 15 bp, Homo sapiens
gttgtaattaaacga

SEQ ID NO: 48350 - DNA, 15 bp, Homo sapiens
ttgtaattaaacgac

SEQ ID NO: 48351 - DNA, 15 bp, Homo sapiens
tgtaattaaacgaca

SEQ ID NO: 48352 - DNA, 15 bp, Homo sapiens
gtaattaaacgacag

SEQ ID NO: 48353 - DNA, 15 bp, Homo sapiens
taattaaacgacagg

SEQ ID NO: 48354 - DNA, 15 bp, Homo sapiens
aattaaacgacaggt

SEQ ID NO: 48355 - DNA, 15 bp, Homo sapiens
attaaacgacaggtt

SEQ ID NO: 48356 - DNA, 15 bp, Homo sapiens
ttaaacgacaggttg

SEQ ID NO: 48357 - DNA, 15 bp, Homo sapiens
taaacgacaggttgc

SEQ ID NO: 48358 - DNA, 15 bp, Homo sapiens
aaacgacaggttgcc

SEQ ID NO: 48359 - DNA, 15 bp, Homo sapiens
aacgacaggttgcct

SEQ ID NO: 48360 - DNA, 15 bp, Homo sapiens
acgacaggttgcctt

SEQ ID NO: 48361 - DNA, 15 bp, Homo sapiens
cgacaggttgccttc

SEQ ID NO: 48362 - DNA, 15 bp, Homo sapiens
gacaggttgccttct

SEQ ID NO: 48363 - DNA, 15 bp, Homo sapiens
acaggttgccttcta

SEQ ID NO: 48364 - DNA, 15 bp, Homo sapiens
caggttgccttctag

SEQ ID NO: 48365 - DNA, 15 bp, Homo sapiens
aggttgccttctagg

SEQ ID NO: 48366 - DNA, 15 bp, Homo sapiens
ggttgccttctaggt

SEQ ID NO: 48367 - DNA, 15 bp, Homo sapiens
gttgccttctaggtt

SEQ ID NO: 48368 - DNA, 15 bp, Homo sapiens
ttgccttctaggttt

SEQ ID NO: 48369 - DNA, 15 bp, Homo sapiens
tgccttctaggtttt

SEQ ID NO: 48370 - DNA, 15 bp, Homo sapiens
gccttctaggtttta

SEQ ID NO: 48371 - DNA, 15 bp, Homo sapiens
ccttctaggttttat

SEQ ID NO: 48372 - DNA, 15 bp, Homo sapiens
cttctaggttttatt

SEQ ID NO: 48373 - DNA, 15 bp, Homo sapiens
ttctaggttttattt

SEQ ID NO: 48374 - DNA, 15 bp, Homo sapiens
tctaggttttatttc

SEQ ID NO: 48375 - DNA, 15 bp, Homo sapiens
ctaggttttatttca

SEQ ID NO: 48376 - DNA, 15 bp, Homo sapiens
taggttttatttcag

SEQ ID NO: 48377 - DNA, 15 bp, Homo sapiens
aggttttatttcagt

SEQ ID NO: 48378 - DNA, 15 bp, Homo sapiens
ggttttatttcagta

SEQ ID NO: 48379 - DNA, 15 bp, Homo sapiens
gttttatttcagtaa

SEQ ID NO: 48380 - DNA, 15 bp, Homo sapiens
ttttatttcagtaag

SEQ ID NO: 48381 - DNA, 15 bp, Homo sapiens
tttatttcagtaagt

SEQ ID NO: 48382 - DNA, 15 bp, Homo sapiens
ttatttcagtaagtc

SEQ ID NO: 48383 - DNA, 15 bp, Homo sapiens
tatttcagtaagtca

SEQ ID NO: 48384 - DNA, 15 bp, Homo sapiens
atttcagtaagtcaa

SEQ ID NO: 48385 - DNA, 15 bp, Homo sapiens
tttcagtaagtcaat

SEQ ID NO: 48386 - DNA, 15 bp, Homo sapiens
ttcagtaagtcaatt

SEQ ID NO: 48387 - DNA, 15 bp, Homo sapiens
tcagtaagtcaattt

SEQ ID NO: 48388 - DNA, 15 bp, Homo sapiens
cagtaagtcaatttg

SEQ ID NO: 48389 - DNA, 15 bp, Homo sapiens
agtaagtcaatttga

SEQ ID NO: 48390 - DNA, 15 bp, Homo sapiens
gtaagtcaatttgaa

SEQ ID NO: 48391 - DNA, 15 bp, Homo sapiens
taagtcaatttgaag

SEQ ID NO: 48392 - DNA, 15 bp, Homo sapiens
aagtcaatttgaagt

SEQ ID NO: 48393 - DNA, 15 bp, Homo sapiens
agtcaatttgaagtt

SEQ ID NO: 48394 - DNA, 15 bp, Homo sapiens
gtcaatttgaagttc

SEQ ID NO: 48395 - DNA, 15 bp, Homo sapiens
tcaatttgaagttca

SEQ ID NO: 48396 - DNA, 15 bp, Homo sapiens
caatttgaagttcag

SEQ ID NO: 48397 - DNA, 15 bp, Homo sapiens
aatttgaagttcagt

SEQ ID NO: 48398 - DNA, 15 bp, Homo sapiens
atttgaagttcagtg

SEQ ID NO: 48399 - DNA, 15 bp, Homo sapiens
tttgaagttcagtga

SEQ ID NO: 48400 - DNA, 15 bp, Homo sapiens
ttgaagttcagtgat

SEQ ID NO: 48401 - DNA, 15 bp, Homo sapiens
tgaagttcagtgatt

SEQ ID NO: 48402 - DNA, 15 bp, Homo sapiens
gaagttcagtgattt

SEQ ID NO: 48403 - DNA, 15 bp, Homo sapiens
aagttcagtgatttt

SEQ ID NO: 48404 - DNA, 15 bp, Homo sapiens
agttcagtgattttt

SEQ ID NO: 48405 - DNA, 15 bp, Homo sapiens
gttcagtgatttttt

SEQ ID NO: 48406 - DNA, 15 bp, Homo sapiens
ttcagtgatttttta

SEQ ID NO: 48407 - DNA, 15 bp, Homo sapiens
tcagtgattttttat

SEQ ID NO: 48408 - DNA, 15 bp, Homo sapiens
cagtgattttttatc

SEQ ID NO: 48409 - DNA, 15 bp, Homo sapiens
agtgattttttatca

SEQ ID NO: 48410 - DNA, 15 bp, Homo sapiens
gtgattttttatcat

SEQ ID NO: 48411 - DNA, 15 bp, Homo sapiens
tgattttttatcata

SEQ ID NO: 48412 - DNA, 15 bp, Homo sapiens
gattttttatcatat

SEQ ID NO: 48413 - DNA, 15 bp, Homo sapiens
attttttatcatata

SEQ ID NO: 48414 - DNA, 15 bp, Homo sapiens
ttttttatcatataa

SEQ ID NO: 48415 - DNA, 15 bp, Homo sapiens
tttttatcatataat

SEQ ID NO: 48416 - DNA, 15 bp, Homo sapiens
ttttatcatataatt

SEQ ID NO: 48417 - DNA, 15 bp, Homo sapiens
tttatcatataattt

SEQ ID NO: 48418 - DNA, 15 bp, Homo sapiens
ttatcatataatttt

SEQ ID NO: 48419 - DNA, 15 bp, Homo sapiens
tatcatataatttta

SEQ ID NO: 48420 - DNA, 15 bp, Homo sapiens
atcatataattttat

SEQ ID NO: 48421 - DNA, 15 bp, Homo sapiens
tcatataattttatg

SEQ ID NO: 48422 - DNA, 15 bp, Homo sapiens
catataattttatgt

SEQ ID NO: 48423 - DNA, 15 bp, Homo sapiens
atataattttatgtt

SEQ ID NO: 48424 - DNA, 15 bp, Homo sapiens
tataattttatgttt

SEQ ID NO: 48425 - DNA, 15 bp, Homo sapiens
ataattttatgtttc

SEQ ID NO: 48426 - DNA, 15 bp, Homo sapiens
taattttatgtttcc

SEQ ID NO: 48427 - DNA, 15 bp, Homo sapiens
aattttatgtttcct

SEQ ID NO: 48428 - DNA, 15 bp, Homo sapiens
attttatgtttcctt

SEQ ID NO: 48429 - DNA, 15 bp, Homo sapiens
ttttatgtttcctta

SEQ ID NO: 48430 - DNA, 15 bp, Homo sapiens
tttatgtttccttac

SEQ ID NO: 48431 - DNA, 15 bp, Homo sapiens
ttatgtttccttact

SEQ ID NO: 48432 - DNA, 15 bp, Homo sapiens
tatgtttccttacta

SEQ ID NO: 48433 - DNA, 15 bp, Homo sapiens
atgtttccttactat

SEQ ID NO: 48434 - DNA, 15 bp, Homo sapiens
tgtttccttactata

SEQ ID NO: 48435 - DNA, 15 bp, Homo sapiens
gtttccttactatac

SEQ ID NO: 48436 - DNA, 15 bp, Homo sapiens
tttccttactatact

SEQ ID NO: 48437 - DNA, 15 bp, Homo sapiens
ttccttactatactg

SEQ ID NO: 48438 - DNA, 15 bp, Homo sapiens
tccttactatactgt

SEQ ID NO: 48439 - DNA, 15 bp, Homo sapiens
ccttactatactgtc

SEQ ID NO: 48440 - DNA, 15 bp, Homo sapiens
cttactatactgtct

SEQ ID NO: 48441 - DNA, 15 bp, Homo sapiens
ttactatactgtctt

SEQ ID NO: 48442 - DNA, 15 bp, Homo sapiens
tactatactgtctta

SEQ ID NO: 48443 - DNA, 15 bp, Homo sapiens
actatactgtcttag

SEQ ID NO: 48444 - DNA, 15 bp, Homo sapiens
ctatactgtcttagt

SEQ ID NO: 48445 - DNA, 15 bp, Homo sapiens
tatactgtcttagtt

SEQ ID NO: 48446 - DNA, 15 bp, Homo sapiens
atactgtcttagttt

SEQ ID NO: 48447 - DNA, 15 bp, Homo sapiens
tactgtcttagtttt

SEQ ID NO: 48448 - DNA, 15 bp, Homo sapiens
actgtcttagtttta

SEQ ID NO: 48449 - DNA, 15 bp, Homo sapiens
ctgtcttagttttaa

SEQ ID NO: 48450 - DNA, 15 bp, Homo sapiens
tgtcttagttttaag

SEQ ID NO: 48451 - DNA, 15 bp, Homo sapiens
gtcttagttttaaga

SEQ ID NO: 48452 - DNA, 15 bp, Homo sapiens
tcttagttttaagaa

SEQ ID NO: 48453 - DNA, 15 bp, Homo sapiens
cttagttttaagaaa

SEQ ID NO: 48454 - DNA, 15 bp, Homo sapiens
ttagttttaagaaat

SEQ ID NO: 48455 - DNA, 15 bp, Homo sapiens
tagttttaagaaatc

SEQ ID NO: 48456 - DNA, 15 bp, Homo sapiens
agttttaagaaatcc

SEQ ID NO: 48457 - DNA, 15 bp, Homo sapiens
gttttaagaaatcct

SEQ ID NO: 48458 - DNA, 15 bp, Homo sapiens
ttttaagaaatcctc

SEQ ID NO: 48459 - DNA, 15 bp, Homo sapiens
tttaagaaatcctcc

SEQ ID NO: 48460 - DNA, 15 bp, Homo sapiens
ttaagaaatcctccc

SEQ ID NO: 48461 - DNA, 15 bp, Homo sapiens
taagaaatcctccct

SEQ ID NO: 48462 - DNA, 15 bp, Homo sapiens
aagaaatcctccctt

SEQ ID NO: 48463 - DNA, 15 bp, Homo sapiens
agaaatcctcccttg

SEQ ID NO: 48464 - DNA, 15 bp, Homo sapiens
gaaatcctcccttgc

SEQ ID NO: 48465 - DNA, 15 bp, Homo sapiens
aaatcctcccttgcc

SEQ ID NO: 48466 - DNA, 15 bp, Homo sapiens
aatcctcccttgcct

SEQ ID NO: 48467 - DNA, 15 bp, Homo sapiens
atcctcccttgcctg

SEQ ID NO: 48468 - DNA, 15 bp, Homo sapiens
tcctcccttgcctga

SEQ ID NO: 48469 - DNA, 15 bp, Homo sapiens
cctcccttgcctgac

SEQ ID NO: 48470 - DNA, 15 bp, Homo sapiens
ctcccttgcctgacc

SEQ ID NO: 48471 - DNA, 15 bp, Homo sapiens
tcccttgcctgacct

SEQ ID NO: 48472 - DNA, 15 bp, Homo sapiens
cccttgcctgacctc

SEQ ID NO: 48473 - DNA, 15 bp, Homo sapiens
ccttgcctgacctcc

SEQ ID NO: 48474 - DNA, 15 bp, Homo sapiens
cttgcctgacctcct

SEQ ID NO: 48475 - DNA, 15 bp, Homo sapiens
ttgcctgacctcctc

SEQ ID NO: 48476 - DNA, 15 bp, Homo sapiens
tgcctgacctcctct

SEQ ID NO: 48477 - DNA, 15 bp, Homo sapiens
gcctgacctcctctc

SEQ ID NO: 48478 - DNA, 15 bp, Homo sapiens
cctgacctcctctct

SEQ ID NO: 48479 - DNA, 15 bp, Homo sapiens
ctgacctcctctctc

SEQ ID NO: 48480 - DNA, 15 bp, Homo sapiens
tgacctcctctctcc

SEQ ID NO: 48481 - DNA, 15 bp, Homo sapiens
gacctcctctctcca

SEQ ID NO: 48482 - DNA, 15 bp, Homo sapiens
acctcctctctccaa

SEQ ID NO: 48483 - DNA, 15 bp, Homo sapiens
cctcctctctccaaa

SEQ ID NO: 48484 - DNA, 15 bp, Homo sapiens
ctcctctctccaaaa

SEQ ID NO: 48485 - DNA, 15 bp, Homo sapiens
tcctctctccaaaaa

SEQ ID NO: 48486 - DNA, 15 bp, Homo sapiens
cctctctccaaaaat

SEQ ID NO: 48487 - DNA, 15 bp, Homo sapiens
ctctctccaaaaatg

SEQ ID NO: 48488 - DNA, 15 bp, Homo sapiens
tctctccaaaaatgc

SEQ ID NO: 48489 - DNA, 15 bp, Homo sapiens
ctctccaaaaatgca

SEQ ID NO: 48490 - DNA, 15 bp, Homo sapiens
tctccaaaaatgcag

SEQ ID NO: 48491 - DNA, 15 bp, Homo sapiens
ctccaaaaatgcaga

SEQ ID NO: 48492 - DNA, 15 bp, Homo sapiens
tccaaaaatgcagag

SEQ ID NO: 48493 - DNA, 15 bp, Homo sapiens
ccaaaaatgcagagg

SEQ ID NO: 48494 - DNA, 15 bp, Homo sapiens
caaaaatgcagaggc

SEQ ID NO: 48495 - DNA, 15 bp, Homo sapiens
aaaaatgcagaggca

SEQ ID NO: 48496 - DNA, 15 bp, Homo sapiens
aaaatgcagaggcat

SEQ ID NO: 48497 - DNA, 15 bp, Homo sapiens
aaatgcagaggcatg

SEQ ID NO: 48498 - DNA, 15 bp, Homo sapiens
aatgcagaggcatgt

SEQ ID NO: 48499 - DNA, 15 bp, Homo sapiens
atgcagaggcatgtc

SEQ ID NO: 48500 - DNA, 15 bp, Homo sapiens
tgcagaggcatgtca

SEQ ID NO: 48501 - DNA, 15 bp, Homo sapiens
gcagaggcatgtcaa

SEQ ID NO: 48502 - DNA, 15 bp, Homo sapiens
cagaggcatgtcaaa

SEQ ID NO: 48503 - DNA, 15 bp, Homo sapiens
agaggcatgtcaaaa

SEQ ID NO: 48504 - DNA, 15 bp, Homo sapiens
gaggcatgtcaaaaa

SEQ ID NO: 48505 - DNA, 15 bp, Homo sapiens
aggcatgtcaaaaac

SEQ ID NO: 48506 - DNA, 15 bp, Homo sapiens
ggcatgtcaaaaaca

SEQ ID NO: 48507 - DNA, 15 bp, Homo sapiens
gcatgtcaaaaacac

SEQ ID NO: 48508 - DNA, 15 bp, Homo sapiens
catgtcaaaaacaca

SEQ ID NO: 48509 - DNA, 15 bp, Homo sapiens
atgtcaaaaacacag

SEQ ID NO: 48510 - DNA, 15 bp, Homo sapiens
tgtcaaaaacacaga

SEQ ID NO: 48511 - DNA, 15 bp, Homo sapiens
gtcaaaaacacagag

SEQ ID NO: 48512 - DNA, 15 bp, Homo sapiens
tcaaaaacacagagg

SEQ ID NO: 48513 - DNA, 15 bp, Homo sapiens
caaaaacacagaggg

SEQ ID NO: 48514 - DNA, 15 bp, Homo sapiens
aaaaacacagagggt

SEQ ID NO: 48515 - DNA, 15 bp, Homo sapiens
aaaacacagagggtc

SEQ ID NO: 48516 - DNA, 15 bp, Homo sapiens
aaacacagagggtcg

SEQ ID NO: 48517 - DNA, 15 bp, Homo sapiens
aacacagagggtcgt

SEQ ID NO: 48518 - DNA, 15 bp, Homo sapiens
acacagagggtcgtc

SEQ ID NO: 48519 - DNA, 15 bp, Homo sapiens
cacagagggtcgtca

SEQ ID NO: 48520 - DNA, 15 bp, Homo sapiens
acagagggtcgtcat

SEQ ID NO: 48521 - DNA, 15 bp, Homo sapiens
cagagggtcgtcata

SEQ ID NO: 48522 - DNA, 15 bp, Homo sapiens
agagggtcgtcataa

SEQ ID NO: 48523 - DNA, 15 bp, Homo sapiens
gagggtcgtcataaa

SEQ ID NO: 48524 - DNA, 15 bp, Homo sapiens
agggtcgtcataaag

SEQ ID NO: 48525 - DNA, 15 bp, Homo sapiens
gggtcgtcataaagt

SEQ ID NO: 48526 - DNA, 15 bp, Homo sapiens
ggtcgtcataaagtt

SEQ ID NO: 48527 - DNA, 15 bp, Homo sapiens
gtcgtcataaagttt

SEQ ID NO: 48528 - DNA, 15 bp, Homo sapiens
tcgtcataaagtttc

SEQ ID NO: 48529 - DNA, 15 bp, Homo sapiens
cgtcataaagtttcc

SEQ ID NO: 48530 - DNA, 15 bp, Homo sapiens
gtcataaagtttccg

SEQ ID NO: 48531 - DNA, 15 bp, Homo sapiens
tcataaagtttccgt

SEQ ID NO: 48532 - DNA, 15 bp, Homo sapiens
cataaagtttccgtc

SEQ ID NO: 48533 - DNA, 15 bp, Homo sapiens
ataaagtttccgtca

SEQ ID NO: 48534 - DNA, 15 bp, Homo sapiens
taaagtttccgtcag

SEQ ID NO: 48535 - DNA, 15 bp, Homo sapiens
aaagtttccgtcaga

SEQ ID NO: 48536 - DNA, 15 bp, Homo sapiens
aagtttccgtcagac

SEQ ID NO: 48537 - DNA, 15 bp, Homo sapiens
agtttccgtcagacc

SEQ ID NO: 48538 - DNA, 15 bp, Homo sapiens
gtttccgtcagacca

SEQ ID NO: 48539 - DNA, 15 bp, Homo sapiens
tttccgtcagaccaa

SEQ ID NO: 48540 - DNA, 15 bp, Homo sapiens
ttccgtcagaccaaa

SEQ ID NO: 48541 - DNA, 15 bp, Homo sapiens
tccgtcagaccaaag

SEQ ID NO: 48542 - DNA, 15 bp, Homo sapiens
ccgtcagaccaaagg

SEQ ID NO: 48543 - DNA, 15 bp, Homo sapiens
cgtcagaccaaagga

SEQ ID NO: 48544 - DNA, 15 bp, Homo sapiens
gtcagaccaaaggaa

SEQ ID NO: 48545 - DNA, 15 bp, Homo sapiens
tcagaccaaaggaac

SEQ ID NO: 48546 - DNA, 15 bp, Homo sapiens
cagaccaaaggaacc

SEQ ID NO: 48547 - DNA, 15 bp, Homo sapiens
agaccaaaggaacca

SEQ ID NO: 48548 - DNA, 15 bp, Homo sapiens
gaccaaaggaaccaa

SEQ ID NO: 48549 - DNA, 15 bp, Homo sapiens
accaaaggaaccaag

SEQ ID NO: 48550 - DNA, 15 bp, Homo sapiens
ccaaaggaaccaaga

SEQ ID NO: 48551 - DNA, 15 bp, Homo sapiens
caaaggaaccaagat

SEQ ID NO: 48552 - DNA, 15 bp, Homo sapiens
aaaggaaccaagatg

SEQ ID NO: 48553 - DNA, 15 bp, Homo sapiens
aaggaaccaagatga

SEQ ID NO: 48554 - DNA, 15 bp, Homo sapiens
aggaaccaagatgaa

SEQ ID NO: 48555 - DNA, 15 bp, Homo sapiens
ggaaccaagatgaaa

SEQ ID NO: 48556 - DNA, 15 bp, Homo sapiens
gaaccaagatgaaag

SEQ ID NO: 48557 - DNA, 15 bp, Homo sapiens
aaccaagatgaaagc

SEQ ID NO: 48558 - DNA, 15 bp, Homo sapiens
accaagatgaaagca

SEQ ID NO: 48559 - DNA, 15 bp, Homo sapiens
ccaagatgaaagcat

SEQ ID NO: 48560 - DNA, 15 bp, Homo sapiens
caagatgaaagcatg

SEQ ID NO: 48561 - DNA, 15 bp, Homo sapiens
aagatgaaagcatgt

SEQ ID NO: 48562 - DNA, 15 bp, Homo sapiens
agatgaaagcatgtt

SEQ ID NO: 48563 - DNA, 15 bp, Homo sapiens
gatgaaagcatgttt

SEQ ID NO: 48564 - DNA, 15 bp, Homo sapiens
atgaaagcatgttta

SEQ ID NO: 48565 - DNA, 15 bp, Homo sapiens
tgaaagcatgtttaa

SEQ ID NO: 48566 - DNA, 15 bp, Homo sapiens
gaaagcatgtttaag

SEQ ID NO: 48567 - DNA, 15 bp, Homo sapiens
aaagcatgtttaaga

SEQ ID NO: 48568 - DNA, 15 bp, Homo sapiens
aagcatgtttaagag

SEQ ID NO: 48569 - DNA, 15 bp, Homo sapiens
agcatgtttaagagc

SEQ ID NO: 48570 - DNA, 15 bp, Homo sapiens
gcatgtttaagagct

SEQ ID NO: 48571 - DNA, 15 bp, Homo sapiens
catgtttaagagcta

SEQ ID NO: 48572 - DNA, 15 bp, Homo sapiens
atgtttaagagctac

SEQ ID NO: 48573 - DNA, 15 bp, Homo sapiens
tgtttaagagctact

SEQ ID NO: 48574 - DNA, 15 bp, Homo sapiens
gtttaagagctacta

SEQ ID NO: 48575 - DNA, 15 bp, Homo sapiens
tttaagagctactag

SEQ ID NO: 48576 - DNA, 15 bp, Homo sapiens
ttaagagctactagg

SEQ ID NO: 48577 - DNA, 15 bp, Homo sapiens
taagagctactaggt

SEQ ID NO: 48578 - DNA, 15 bp, Homo sapiens
aagagctactaggtt

SEQ ID NO: 48579 - DNA, 15 bp, Homo sapiens
agagctactaggttc

SEQ ID NO: 48580 - DNA, 15 bp, Homo sapiens
gagctactaggttct

SEQ ID NO: 48581 - DNA, 15 bp, Homo sapiens
agctactaggttctg

SEQ ID NO: 48582 - DNA, 15 bp, Homo sapiens
gctactaggttctgg

SEQ ID NO: 48583 - DNA, 15 bp, Homo sapiens
ctactaggttctggg

SEQ ID NO: 48584 - DNA, 15 bp, Homo sapiens
tactaggttctggga

SEQ ID NO: 48585 - DNA, 15 bp, Homo sapiens
actaggttctgggag

SEQ ID NO: 48586 - DNA, 15 bp, Homo sapiens
ctaggttctgggaga

SEQ ID NO: 48587 - DNA, 15 bp, Homo sapiens
taggttctgggagat

SEQ ID NO: 48588 - DNA, 15 bp, Homo sapiens
aggttctgggagatt

SEQ ID NO: 48589 - DNA, 15 bp, Homo sapiens
ggttctgggagattt

SEQ ID NO: 48590 - DNA, 15 bp, Homo sapiens
gttctgggagatttc

SEQ ID NO: 48591 - DNA, 15 bp, Homo sapiens
ttctgggagatttca

SEQ ID NO: 48592 - DNA, 15 bp, Homo sapiens
tctgggagatttcaa

SEQ ID NO: 48593 - DNA, 15 bp, Homo sapiens
ctgggagatttcaaa

SEQ ID NO: 48594 - DNA, 15 bp, Homo sapiens
tgggagatttcaaaa

SEQ ID NO: 48595 - DNA, 15 bp, Homo sapiens
gggagatttcaaaat

SEQ ID NO: 48596 - DNA, 15 bp, Homo sapiens
ggagatttcaaaatc

SEQ ID NO: 48597 - DNA, 15 bp, Homo sapiens
gagatttcaaaatca

SEQ ID NO: 48598 - DNA, 15 bp, Homo sapiens
agatttcaaaatcag

SEQ ID NO: 48599 - DNA, 15 bp, Homo sapiens
gatttcaaaatcagg

SEQ ID NO: 48600 - DNA, 15 bp, Homo sapiens
atttcaaaatcagga

SEQ ID NO: 48601 - DNA, 15 bp, Homo sapiens
tttcaaaatcaggac

SEQ ID NO: 48602 - DNA, 15 bp, Homo sapiens
ttcaaaatcaggaca

SEQ ID NO: 48603 - DNA, 15 bp, Homo sapiens
tcaaaatcaggacat

SEQ ID NO: 48604 - DNA, 15 bp, Homo sapiens
caaaatcaggacatt

SEQ ID NO: 48605 - DNA, 15 bp, Homo sapiens
aaaatcaggacatta

SEQ ID NO: 48606 - DNA, 15 bp, Homo sapiens
aaatcaggacattac

SEQ ID NO: 48607 - DNA, 15 bp, Homo sapiens
aatcaggacattact

SEQ ID NO: 48608 - DNA, 15 bp, Homo sapiens
atcaggacattacta

SEQ ID NO: 48609 - DNA, 15 bp, Homo sapiens
tcaggacattactac

SEQ ID NO: 48610 - DNA, 15 bp, Homo sapiens
caggacattactacc

SEQ ID NO: 48611 - DNA, 15 bp, Homo sapiens
aggacattactacca

SEQ ID NO: 48612 - DNA, 15 bp, Homo sapiens
ggacattactaccat

SEQ ID NO: 48613 - DNA, 15 bp, Homo sapiens
gacattactaccatg

SEQ ID NO: 48614 - DNA, 15 bp, Homo sapiens
acattactaccatga

SEQ ID NO: 48615 - DNA, 15 bp, Homo sapiens
cattactaccatgac

SEQ ID NO: 48616 - DNA, 15 bp, Homo sapiens
attactaccatgaca

SEQ ID NO: 48617 - DNA, 15 bp, Homo sapiens
ttactaccatgacaa

SEQ ID NO: 48618 - DNA, 15 bp, Homo sapiens
tactaccatgacaac

SEQ ID NO: 48619 - DNA, 15 bp, Homo sapiens
actaccatgacaacc

SEQ ID NO: 48620 - DNA, 15 bp, Homo sapiens
ctaccatgacaacca

SEQ ID NO: 48621 - DNA, 15 bp, Homo sapiens
taccatgacaaccaa

SEQ ID NO: 48622 - DNA, 15 bp, Homo sapiens
accatgacaaccaat

SEQ ID NO: 48623 - DNA, 15 bp, Homo sapiens
ccatgacaaccaatg

SEQ ID NO: 48624 - DNA, 15 bp, Homo sapiens
catgacaaccaatga

SEQ ID NO: 48625 - DNA, 15 bp, Homo sapiens
atgacaaccaatgaa

SEQ ID NO: 48626 - DNA, 15 bp, Homo sapiens
tgacaaccaatgaaa

SEQ ID NO: 48627 - DNA, 15 bp, Homo sapiens
gacaaccaatgaaaa

SEQ ID NO: 48628 - DNA, 15 bp, Homo sapiens
acaaccaatgaaaag

SEQ ID NO: 48629 - DNA, 15 bp, Homo sapiens
caaccaatgaaaagt

SEQ ID NO: 48630 - DNA, 15 bp, Homo sapiens
aaccaatgaaaagtt

SEQ ID NO: 48631 - DNA, 15 bp, Homo sapiens
accaatgaaaagttc

SEQ ID NO: 48632 - DNA, 15 bp, Homo sapiens
ccaatgaaaagttct

SEQ ID NO: 48633 - DNA, 15 bp, Homo sapiens
caatgaaaagttctt

SEQ ID NO: 48634 - DNA, 15 bp, Homo sapiens
aatgaaaagttcttt

SEQ ID NO: 48635 - DNA, 15 bp, Homo sapiens
atgaaaagttctttc

SEQ ID NO: 48636 - DNA, 15 bp, Homo sapiens
tgaaaagttctttca

SEQ ID NO: 48637 - DNA, 15 bp, Homo sapiens
gaaaagttctttcaa

SEQ ID NO: 48638 - DNA, 15 bp, Homo sapiens
aaaagttctttcaag

SEQ ID NO: 48639 - DNA, 15 bp, Homo sapiens
aaagttctttcaagt

SEQ ID NO: 48640 - DNA, 15 bp, Homo sapiens
aagttctttcaagtg

SEQ ID NO: 48641 - DNA, 15 bp, Homo sapiens
agttctttcaagtga

SEQ ID NO: 48642 - DNA, 15 bp, Homo sapiens
gttctttcaagtgaa

SEQ ID NO: 48643 - DNA, 15 bp, Homo sapiens
ttctttcaagtgaac

SEQ ID NO: 48644 - DNA, 15 bp, Homo sapiens
tctttcaagtgaacc

SEQ ID NO: 48645 - DNA, 15 bp, Homo sapiens
ctttcaagtgaacct

SEQ ID NO: 48646 - DNA, 15 bp, Homo sapiens
tttcaagtgaacctt

SEQ ID NO: 48647 - DNA, 15 bp, Homo sapiens
ttcaagtgaaccttt

SEQ ID NO: 48648 - DNA, 15 bp, Homo sapiens
tcaagtgaacctttg

SEQ ID NO: 48649 - DNA, 15 bp, Homo sapiens
caagtgaacctttgg

SEQ ID NO: 48650 - DNA, 15 bp, Homo sapiens
aagtgaacctttggg

SEQ ID NO: 48651 - DNA, 15 bp, Homo sapiens
agtgaacctttgggg

SEQ ID NO: 48652 - DNA, 15 bp, Homo sapiens
gtgaacctttgggga

SEQ ID NO: 48653 - DNA, 15 bp, Homo sapiens
tgaacctttggggaa

SEQ ID NO: 48654 - DNA, 15 bp, Homo sapiens
gaacctttggggaaa

SEQ ID NO: 48655 - DNA, 15 bp, Homo sapiens
aacctttggggaaaa

SEQ ID NO: 48656 - DNA, 15 bp, Homo sapiens
acctttggggaaaac

SEQ ID NO: 48657 - DNA, 15 bp, Homo sapiens
cctttggggaaaact

SEQ ID NO: 48658 - DNA, 15 bp, Homo sapiens
ctttggggaaaacta

SEQ ID NO: 48659 - DNA, 15 bp, Homo sapiens
tttggggaaaactat

SEQ ID NO: 48660 - DNA, 15 bp, Homo sapiens
ttggggaaaactata

SEQ ID NO: 48661 - DNA, 15 bp, Homo sapiens
tggggaaaactatat

SEQ ID NO: 48662 - DNA, 15 bp, Homo sapiens
ggggaaaactatata

SEQ ID NO: 48663 - DNA, 15 bp, Homo sapiens
gggaaaactatataa

SEQ ID NO: 48664 - DNA, 15 bp, Homo sapiens
ggaaaactatataac

SEQ ID NO: 48665 - DNA, 15 bp, Homo sapiens
gaaaactatataacg

SEQ ID NO: 48666 - DNA, 15 bp, Homo sapiens
aaaactatataacgt

SEQ ID NO: 48667 - DNA, 15 bp, Homo sapiens
aaactatataacgtt

SEQ ID NO: 48668 - DNA, 15 bp, Homo sapiens
aactatataacgttc

SEQ ID NO: 48669 - DNA, 15 bp, Homo sapiens
actatataacgttcc

SEQ ID NO: 48670 - DNA, 15 bp, Homo sapiens
ctatataacgttcct

SEQ ID NO: 48671 - DNA, 15 bp, Homo sapiens
tatataacgttcctt

SEQ ID NO: 48672 - DNA, 15 bp, Homo sapiens
atataacgttcctta

SEQ ID NO: 48673 - DNA, 15 bp, Homo sapiens
tataacgttccttac

SEQ ID NO: 48674 - DNA, 15 bp, Homo sapiens
ataacgttccttact

SEQ ID NO: 48675 - DNA, 15 bp, Homo sapiens
taacgttccttactc

SEQ ID NO: 48676 - DNA, 15 bp, Homo sapiens
aacgttccttactct

SEQ ID NO: 48677 - DNA, 15 bp, Homo sapiens
acgttccttactctc

SEQ ID NO: 48678 - DNA, 15 bp, Homo sapiens
cgttccttactctct

SEQ ID NO: 48679 - DNA, 15 bp, Homo sapiens
gttccttactctcta

SEQ ID NO: 48680 - DNA, 15 bp, Homo sapiens
ttccttactctctag

SEQ ID NO: 48681 - DNA, 15 bp, Homo sapiens
tccttactctctagg

SEQ ID NO: 48682 - DNA, 15 bp, Homo sapiens
ccttactctctaggc

SEQ ID NO: 48683 - DNA, 15 bp, Homo sapiens
cttactctctaggct

SEQ ID NO: 48684 - DNA, 15 bp, Homo sapiens
ttactctctaggctc

SEQ ID NO: 48685 - DNA, 15 bp, Homo sapiens
tactctctaggctct

SEQ ID NO: 48686 - DNA, 15 bp, Homo sapiens
actctctaggctctc

SEQ ID NO: 48687 - DNA, 15 bp, Homo sapiens
ctctctaggctctct

SEQ ID NO: 48688 - DNA, 15 bp, Homo sapiens
tctctaggctctctg

SEQ ID NO: 48689 - DNA, 15 bp, Homo sapiens
ctctaggctctctgg

SEQ ID NO: 48690 - DNA, 15 bp, Homo sapiens
tctaggctctctgga

SEQ ID NO: 48691 - DNA, 15 bp, Homo sapiens
ctaggctctctggaa

SEQ ID NO: 48692 - DNA, 15 bp, Homo sapiens
taggctctctggaaa

SEQ ID NO: 48693 - DNA, 15 bp, Homo sapiens
aggctctctggaaat

SEQ ID NO: 48694 - DNA, 15 bp, Homo sapiens
ggctctctggaaata

SEQ ID NO: 48695 - DNA, 15 bp, Homo sapiens
gctctctggaaataa

SEQ ID NO: 48696 - DNA, 15 bp, Homo sapiens
ctctctggaaataaa

SEQ ID NO: 48697 - DNA, 15 bp, Homo sapiens
tctctggaaataaac

SEQ ID NO: 48698 - DNA, 15 bp, Homo sapiens
ctctggaaataaact

SEQ ID NO: 48699 - DNA, 15 bp, Homo sapiens
tctggaaataaactt

SEQ ID NO: 48700 - DNA, 15 bp, Homo sapiens
ctggaaataaacttt

SEQ ID NO: 48701 - DNA, 15 bp, Homo sapiens
tggaaataaactttt

SEQ ID NO: 48702 - DNA, 15 bp, Homo sapiens
ggaaataaactttta

SEQ ID NO: 48703 - DNA, 15 bp, Homo sapiens
gaaataaacttttac

SEQ ID NO: 48704 - DNA, 15 bp, Homo sapiens
aaataaacttttact

SEQ ID NO: 48705 - DNA, 15 bp, Homo sapiens
aataaacttttactt

SEQ ID NO: 48706 - DNA, 15 bp, Homo sapiens
ataaacttttacttt

SEQ ID NO: 48707 - DNA, 15 bp, Homo sapiens
taaacttttacttta

SEQ ID NO: 48708 - DNA, 15 bp, Homo sapiens
aaacttttactttat

SEQ ID NO: 48709 - DNA, 15 bp, Homo sapiens
aacttttactttatt

SEQ ID NO: 48710 - DNA, 15 bp, Homo sapiens
acttttactttatta

SEQ ID NO: 48711 - DNA, 15 bp, Homo sapiens
cttttactttattat

SEQ ID NO: 48712 - DNA, 15 bp, Homo sapiens
ttttactttattatg

SEQ ID NO: 48713 - DNA, 15 bp, Homo sapiens
tttactttattatgg

SEQ ID NO: 48714 - DNA, 15 bp, Homo sapiens
ttactttattatggc

SEQ ID NO: 48715 - DNA, 15 bp, Homo sapiens
tactttattatggct

SEQ ID NO: 48716 - DNA, 15 bp, Homo sapiens
actttattatggctg

SEQ ID NO: 48717 - DNA, 15 bp, Homo sapiens
ctttattatggctgt

SEQ ID NO: 48718 - DNA, 15 bp, Homo sapiens
tttattatggctgtc

SEQ ID NO: 48719 - DNA, 15 bp, Homo sapiens
ttattatggctgtca

SEQ ID NO: 48720 - DNA, 15 bp, Homo sapiens
tattatggctgtcac

SEQ ID NO: 48721 - DNA, 15 bp, Homo sapiens
attatggctgtcact

SEQ ID NO: 48722 - DNA, 15 bp, Homo sapiens
ttatggctgtcacta

SEQ ID NO: 48723 - DNA, 15 bp, Homo sapiens
tatggctgtcactaa

SEQ ID NO: 48724 - DNA, 15 bp, Homo sapiens
atggctgtcactaaa

SEQ ID NO: 48725 - DNA, 15 bp, Homo sapiens
tggctgtcactaaag

SEQ ID NO: 48726 - DNA, 15 bp, Homo sapiens
ggctgtcactaaagc

SEQ ID NO: 48727 - DNA, 15 bp, Homo sapiens
gctgtcactaaagct

SEQ ID NO: 48728 - DNA, 15 bp, Homo sapiens
ctgtcactaaagctt

SEQ ID NO: 48729 - DNA, 15 bp, Homo sapiens
tgtcactaaagcttg

SEQ ID NO: 48730 - DNA, 15 bp, Homo sapiens
gtcactaaagcttgt

SEQ ID NO: 48731 - DNA, 15 bp, Homo sapiens
tcactaaagcttgta

SEQ ID NO: 48732 - DNA, 15 bp, Homo sapiens
cactaaagcttgtaa

SEQ ID NO: 48733 - DNA, 15 bp, Homo sapiens
actaaagcttgtaaa

SEQ ID NO: 48734 - DNA, 15 bp, Homo sapiens
ctaaagcttgtaaat

SEQ ID NO: 48735 - DNA, 15 bp, Homo sapiens
taaagcttgtaaatt

SEQ ID NO: 48736 - DNA, 15 bp, Homo sapiens
aaagcttgtaaattt

SEQ ID NO: 48737 - DNA, 15 bp, Homo sapiens
aagcttgtaaattta

SEQ ID NO: 48738 - DNA, 15 bp, Homo sapiens
agcttgtaaatttac

SEQ ID NO: 48739 - DNA, 15 bp, Homo sapiens
gcttgtaaatttact

SEQ ID NO: 48740 - DNA, 15 bp, Homo sapiens
cttgtaaatttactt

SEQ ID NO: 48741 - DNA, 15 bp, Homo sapiens
ttgtaaatttacttt

SEQ ID NO: 48742 - DNA, 15 bp, Homo sapiens
tgtaaatttactttg

SEQ ID NO: 48743 - DNA, 15 bp, Homo sapiens
gtaaatttactttgc

SEQ ID NO: 48744 - DNA, 15 bp, Homo sapiens
taaatttactttgct

SEQ ID NO: 48745 - DNA, 15 bp, Homo sapiens
aaatttactttgctt

SEQ ID NO: 48746 - DNA, 15 bp, Homo sapiens
aatttactttgcttc

SEQ ID NO: 48747 - DNA, 15 bp, Homo sapiens
atttactttgcttcc

SEQ ID NO: 48748 - DNA, 15 bp, Homo sapiens
tttactttgcttcct

SEQ ID NO: 48749 - DNA, 15 bp, Homo sapiens
ttactttgcttcctt

SEQ ID NO: 48750 - DNA, 15 bp, Homo sapiens
tactttgcttccttc

SEQ ID NO: 48751 - DNA, 15 bp, Homo sapiens
actttgcttccttcc

SEQ ID NO: 48752 - DNA, 15 bp, Homo sapiens
ctttgcttccttcca

SEQ ID NO: 48753 - DNA, 15 bp, Homo sapiens
tttgcttccttccaa

SEQ ID NO: 48754 - DNA, 15 bp, Homo sapiens
ttgcttccttccaat

SEQ ID NO: 48755 - DNA, 15 bp, Homo sapiens
tgcttccttccaatc

SEQ ID NO: 48756 - DNA, 15 bp, Homo sapiens
gcttccttccaatcg

SEQ ID NO: 48757 - DNA, 15 bp, Homo sapiens
cttccttccaatcgt

SEQ ID NO: 48758 - DNA, 15 bp, Homo sapiens
ttccttccaatcgtt

SEQ ID NO: 48759 - DNA, 15 bp, Homo sapiens
tccttccaatcgttc

SEQ ID NO: 48760 - DNA, 15 bp, Homo sapiens
ccttccaatcgttct

SEQ ID NO: 48761 - DNA, 15 bp, Homo sapiens
cttccaatcgttctc

SEQ ID NO: 48762 - DNA, 15 bp, Homo sapiens
ttccaatcgttctcc

SEQ ID NO: 48763 - DNA, 15 bp, Homo sapiens
tccaatcgttctcct

SEQ ID NO: 48764 - DNA, 15 bp, Homo sapiens
ccaatcgttctcctg

SEQ ID NO: 48765 - DNA, 15 bp, Homo sapiens
caatcgttctcctgt

SEQ ID NO: 48766 - DNA, 15 bp, Homo sapiens
aatcgttctcctgtc

SEQ ID NO: 48767 - DNA, 15 bp, Homo sapiens
atcgttctcctgtcc

SEQ ID NO: 48768 - DNA, 15 bp, Homo sapiens
tcgttctcctgtccc

SEQ ID NO: 48769 - DNA, 15 bp, Homo sapiens
cgttctcctgtccca

SEQ ID NO: 48770 - DNA, 15 bp, Homo sapiens
gttctcctgtcccac

SEQ ID NO: 48771 - DNA, 15 bp, Homo sapiens
ttctcctgtcccaca

SEQ ID NO: 48772 - DNA, 15 bp, Homo sapiens
tctcctgtcccacac

SEQ ID NO: 48773 - DNA, 15 bp, Homo sapiens
ctcctgtcccacact

SEQ ID NO: 48774 - DNA, 15 bp, Homo sapiens
tcctgtcccacactc

SEQ ID NO: 48775 - DNA, 15 bp, Homo sapiens
cctgtcccacactca

SEQ ID NO: 48776 - DNA, 15 bp, Homo sapiens
ctgtcccacactcag

SEQ ID NO: 48777 - DNA, 15 bp, Homo sapiens
tgtcccacactcagc

SEQ ID NO: 48778 - DNA, 15 bp, Homo sapiens
gtcccacactcagcc

SEQ ID NO: 48779 - DNA, 15 bp, Homo sapiens
tcccacactcagccc

SEQ ID NO: 48780 - DNA, 15 bp, Homo sapiens
cccacactcagcccc

SEQ ID NO: 48781 - DNA, 15 bp, Homo sapiens
ccacactcagccccc

SEQ ID NO: 48782 - DNA, 15 bp, Homo sapiens
cacactcagccccct

SEQ ID NO: 48783 - DNA, 15 bp, Homo sapiens
acactcagcccccta

SEQ ID NO: 48784 - DNA, 15 bp, Homo sapiens
cactcagccccctaa

SEQ ID NO: 48785 - DNA, 15 bp, Homo sapiens
actcagccccctaac

SEQ ID NO: 48786 - DNA, 15 bp, Homo sapiens
ctcagccccctaact

SEQ ID NO: 48787 - DNA, 15 bp, Homo sapiens
tcagccccctaactc

SEQ ID NO: 48788 - DNA, 15 bp, Homo sapiens
cagccccctaactca

SEQ ID NO: 48789 - DNA, 15 bp, Homo sapiens
agccccctaactcac

SEQ ID NO: 48790 - DNA, 15 bp, Homo sapiens
gccccctaactcact

SEQ ID NO: 48791 - DNA, 15 bp, Homo sapiens
ccccctaactcactt

SEQ ID NO: 48792 - DNA, 15 bp, Homo sapiens
cccctaactcactta

SEQ ID NO: 48793 - DNA, 15 bp, Homo sapiens
ccctaactcacttaa

SEQ ID NO: 48794 - DNA, 15 bp, Homo sapiens
cctaactcacttaat

SEQ ID NO: 48795 - DNA, 15 bp, Homo sapiens
ctaactcacttaatg

SEQ ID NO: 48796 - DNA, 15 bp, Homo sapiens
taactcacttaatgc

SEQ ID NO: 48797 - DNA, 15 bp, Homo sapiens
aactcacttaatgca

SEQ ID NO: 48798 - DNA, 15 bp, Homo sapiens
actcacttaatgcaa

SEQ ID NO: 48799 - DNA, 15 bp, Homo sapiens
ctcacttaatgcaac

SEQ ID NO: 48800 - DNA, 15 bp, Homo sapiens
tcacttaatgcaacc

SEQ ID NO: 48801 - DNA, 15 bp, Homo sapiens
cacttaatgcaaccc

SEQ ID NO: 48802 - DNA, 15 bp, Homo sapiens
acttaatgcaaccca

SEQ ID NO: 48803 - DNA, 15 bp, Homo sapiens
cttaatgcaacccat

SEQ ID NO: 48804 - DNA, 15 bp, Homo sapiens
ttaatgcaacccatc

SEQ ID NO: 48805 - DNA, 15 bp, Homo sapiens
taatgcaacccatcc

SEQ ID NO: 48806 - DNA, 15 bp, Homo sapiens
aatgcaacccatcct

SEQ ID NO: 48807 - DNA, 15 bp, Homo sapiens
atgcaacccatcctc

SEQ ID NO: 48808 - DNA, 15 bp, Homo sapiens
tgcaacccatcctca

SEQ ID NO: 48809 - DNA, 15 bp, Homo sapiens
gcaacccatcctcaa

SEQ ID NO: 48810 - DNA, 15 bp, Homo sapiens
caacccatcctcaaa

SEQ ID NO: 48811 - DNA, 15 bp, Homo sapiens
aacccatcctcaaac

SEQ ID NO: 48812 - DNA, 15 bp, Homo sapiens
acccatcctcaaaca

SEQ ID NO: 48813 - DNA, 15 bp, Homo sapiens
cccatcctcaaacat

SEQ ID NO: 48814 - DNA, 15 bp, Homo sapiens
ccatcctcaaacatc

SEQ ID NO: 48815 - DNA, 15 bp, Homo sapiens
catcctcaaacatca

SEQ ID NO: 48816 - DNA, 15 bp, Homo sapiens
atcctcaaacatcaa

SEQ ID NO: 48817 - DNA, 15 bp, Homo sapiens
tcctcaaacatcaat

SEQ ID NO: 48818 - DNA, 15 bp, Homo sapiens
cctcaaacatcaatc

SEQ ID NO: 48819 - DNA, 15 bp, Homo sapiens
ctcaaacatcaatct

SEQ ID NO: 48820 - DNA, 15 bp, Homo sapiens
tcaaacatcaatcta

SEQ ID NO: 48821 - DNA, 15 bp, Homo sapiens
caaacatcaatctat

SEQ ID NO: 48822 - DNA, 15 bp, Homo sapiens
aaacatcaatctata

SEQ ID NO: 48823 - DNA, 15 bp, Homo sapiens
aacatcaatctataa

SEQ ID NO: 48824 - DNA, 15 bp, Homo sapiens
acatcaatctataaa

SEQ ID NO: 48825 - DNA, 15 bp, Homo sapiens
catcaatctataaat

SEQ ID NO: 48826 - DNA, 15 bp, Homo sapiens
atcaatctataaatg

SEQ ID NO: 48827 - DNA, 15 bp, Homo sapiens
tcaatctataaatga

SEQ ID NO: 48828 - DNA, 15 bp, Homo sapiens
caatctataaatgag

SEQ ID NO: 48829 - DNA, 15 bp, Homo sapiens
aatctataaatgaga

SEQ ID NO: 48830 - DNA, 15 bp, Homo sapiens
atctataaatgagac

SEQ ID NO: 48831 - DNA, 15 bp, Homo sapiens
tctataaatgagaca

SEQ ID NO: 48832 - DNA, 15 bp, Homo sapiens
ctataaatgagacat

SEQ ID NO: 48833 - DNA, 15 bp, Homo sapiens
tataaatgagacatc

SEQ ID NO: 48834 - DNA, 15 bp, Homo sapiens
ataaatgagacatca

SEQ ID NO: 48835 - DNA, 15 bp, Homo sapiens
taaatgagacatcag

SEQ ID NO: 48836 - DNA, 15 bp, Homo sapiens
aaatgagacatcagg

SEQ ID NO: 48837 - DNA, 15 bp, Homo sapiens
aatgagacatcaggg

SEQ ID NO: 48838 - DNA, 15 bp, Homo sapiens
atgagacatcagggc

SEQ ID NO: 48839 - DNA, 15 bp, Homo sapiens
tgagacatcagggca

SEQ ID NO: 48840 - DNA, 15 bp, Homo sapiens
gagacatcagggcaa

SEQ ID NO: 48841 - DNA, 15 bp, Homo sapiens
agacatcagggcaat

SEQ ID NO: 48842 - DNA, 15 bp, Homo sapiens
gacatcagggcaatg

SEQ ID NO: 48843 - DNA, 15 bp, Homo sapiens
acatcagggcaatga

SEQ ID NO: 48844 - DNA, 15 bp, Homo sapiens
catcagggcaatgag

SEQ ID NO: 48845 - DNA, 15 bp, Homo sapiens
atcagggcaatgagc

SEQ ID NO: 48846 - DNA, 15 bp, Homo sapiens
tcagggcaatgagcc

SEQ ID NO: 48847 - DNA, 15 bp, Homo sapiens
cagggcaatgagcca

SEQ ID NO: 48848 - DNA, 15 bp, Homo sapiens
agggcaatgagccac

SEQ ID NO: 48849 - DNA, 15 bp, Homo sapiens
gggcaatgagccact

SEQ ID NO: 48850 - DNA, 15 bp, Homo sapiens
ggcaatgagccactt

SEQ ID NO: 48851 - DNA, 15 bp, Homo sapiens
gcaatgagccacttc

SEQ ID NO: 48852 - DNA, 15 bp, Homo sapiens
caatgagccacttct

SEQ ID NO: 48853 - DNA, 15 bp, Homo sapiens
aatgagccacttctt

SEQ ID NO: 48854 - DNA, 15 bp, Homo sapiens
atgagccacttctta

SEQ ID NO: 48855 - DNA, 15 bp, Homo sapiens
tgagccacttcttag

SEQ ID NO: 48856 - DNA, 15 bp, Homo sapiens
gagccacttcttagc

SEQ ID NO: 48857 - DNA, 15 bp, Homo sapiens
agccacttcttagca

SEQ ID NO: 48858 - DNA, 15 bp, Homo sapiens
gccacttcttagcat

SEQ ID NO: 48859 - DNA, 15 bp, Homo sapiens
ccacttcttagcatc

SEQ ID NO: 48860 - DNA, 15 bp, Homo sapiens
cacttcttagcatct

SEQ ID NO: 48861 - DNA, 15 bp, Homo sapiens
acttcttagcatcta

SEQ ID NO: 48862 - DNA, 15 bp, Homo sapiens
cttcttagcatctag

SEQ ID NO: 48863 - DNA, 15 bp, Homo sapiens
ttcttagcatctagt

SEQ ID NO: 48864 - DNA, 15 bp, Homo sapiens
tcttagcatctagta

SEQ ID NO: 48865 - DNA, 15 bp, Homo sapiens
cttagcatctagtat

SEQ ID NO: 48866 - DNA, 15 bp, Homo sapiens
ttagcatctagtata

SEQ ID NO: 48867 - DNA, 15 bp, Homo sapiens
tagcatctagtatat

SEQ ID NO: 48868 - DNA, 15 bp, Homo sapiens
agcatctagtatatt

SEQ ID NO: 48869 - DNA, 15 bp, Homo sapiens
gcatctagtatattt

SEQ ID NO: 48870 - DNA, 15 bp, Homo sapiens
catctagtatatttg

SEQ ID NO: 48871 - DNA, 15 bp, Homo sapiens
atctagtatatttga

SEQ ID NO: 48872 - DNA, 15 bp, Homo sapiens
tctagtatatttgat

SEQ ID NO: 48873 - DNA, 15 bp, Homo sapiens
ctagtatatttgata

SEQ ID NO: 48874 - DNA, 15 bp, Homo sapiens
tagtatatttgataa

SEQ ID NO: 48875 - DNA, 15 bp, Homo sapiens
agtatatttgataag

SEQ ID NO: 48876 - DNA, 15 bp, Homo sapiens
gtatatttgataaga

SEQ ID NO: 48877 - DNA, 15 bp, Homo sapiens
tatatttgataagat

SEQ ID NO: 48878 - DNA, 15 bp, Homo sapiens
atatttgataagatt

SEQ ID NO: 48879 - DNA, 15 bp, Homo sapiens
tatttgataagattt

SEQ ID NO: 48880 - DNA, 15 bp, Homo sapiens
atttgataagatttg

SEQ ID NO: 48881 - DNA, 15 bp, Homo sapiens
tttgataagatttgt

SEQ ID NO: 48882 - DNA, 15 bp, Homo sapiens
ttgataagatttgtc

SEQ ID NO: 48883 - DNA, 15 bp, Homo sapiens
tgataagatttgtct

SEQ ID NO: 48884 - DNA, 15 bp, Homo sapiens
gataagatttgtctc

SEQ ID NO: 48885 - DNA, 15 bp, Homo sapiens
ataagatttgtctca

SEQ ID NO: 48886 - DNA, 15 bp, Homo sapiens
taagatttgtctcat

SEQ ID NO: 48887 - DNA, 15 bp, Homo sapiens
aagatttgtctcatc

SEQ ID NO: 48888 - DNA, 15 bp, Homo sapiens
agatttgtctcatca

SEQ ID NO: 48889 - DNA, 15 bp, Homo sapiens
gatttgtctcatcaa

SEQ ID NO: 48890 - DNA, 15 bp, Homo sapiens
atttgtctcatcaag

SEQ ID NO: 48891 - DNA, 15 bp, Homo sapiens
tttgtctcatcaaga

SEQ ID NO: 48892 - DNA, 15 bp, Homo sapiens
ttgtctcatcaagag

SEQ ID NO: 48893 - DNA, 15 bp, Homo sapiens
tgtctcatcaagagg

SEQ ID NO: 48894 - DNA, 15 bp, Homo sapiens
gtctcatcaagagga

SEQ ID NO: 48895 - DNA, 15 bp, Homo sapiens
tctcatcaagaggat

SEQ ID NO: 48896 - DNA, 15 bp, Homo sapiens
ctcatcaagaggata

SEQ ID NO: 48897 - DNA, 15 bp, Homo sapiens
tcatcaagaggataa

SEQ ID NO: 48898 - DNA, 15 bp, Homo sapiens
catcaagaggataag

SEQ ID NO: 48899 - DNA, 15 bp, Homo sapiens
atcaagaggataagt

SEQ ID NO: 48900 - DNA, 15 bp, Homo sapiens
tcaagaggataagtg

SEQ ID NO: 48901 - DNA, 15 bp, Homo sapiens
caagaggataagtgc

SEQ ID NO: 48902 - DNA, 15 bp, Homo sapiens
aagaggataagtgcc

SEQ ID NO: 48903 - DNA, 15 bp, Homo sapiens
agaggataagtgccc

SEQ ID NO: 48904 - DNA, 15 bp, Homo sapiens
gaggataagtgccct

SEQ ID NO: 48905 - DNA, 15 bp, Homo sapiens
aggataagtgcccta

SEQ ID NO: 48906 - DNA, 15 bp, Homo sapiens
ggataagtgccctag

SEQ ID NO: 48907 - DNA, 15 bp, Homo sapiens
gataagtgccctaga

SEQ ID NO: 48908 - DNA, 15 bp, Homo sapiens
ataagtgccctagag

SEQ ID NO: 48909 - DNA, 15 bp, Homo sapiens
taagtgccctagagc

SEQ ID NO: 48910 - DNA, 15 bp, Homo sapiens
aagtgccctagagct

SEQ ID NO: 48911 - DNA, 15 bp, Homo sapiens
agtgccctagagctt

SEQ ID NO: 48912 - DNA, 15 bp, Homo sapiens
gtgccctagagcttc

SEQ ID NO: 48913 - DNA, 15 bp, Homo sapiens
tgccctagagcttct

SEQ ID NO: 48914 - DNA, 15 bp, Homo sapiens
gccctagagcttcta

SEQ ID NO: 48915 - DNA, 15 bp, Homo sapiens
ccctagagcttctac

SEQ ID NO: 48916 - DNA, 15 bp, Homo sapiens
cctagagcttctact

SEQ ID NO: 48917 - DNA, 15 bp, Homo sapiens
ctagagcttctactt

SEQ ID NO: 48918 - DNA, 15 bp, Homo sapiens
tagagcttctacttg

SEQ ID NO: 48919 - DNA, 15 bp, Homo sapiens
agagcttctacttga

SEQ ID NO: 48920 - DNA, 15 bp, Homo sapiens
gagcttctacttgaa

SEQ ID NO: 48921 - DNA, 15 bp, Homo sapiens
agcttctacttgaac

SEQ ID NO: 48922 - DNA, 15 bp, Homo sapiens
gcttctacttgaact

SEQ ID NO: 48923 - DNA, 15 bp, Homo sapiens
cttctacttgaactt

SEQ ID NO: 48924 - DNA, 15 bp, Homo sapiens
ttctacttgaactta

SEQ ID NO: 48925 - DNA, 15 bp, Homo sapiens
tctacttgaacttaa

SEQ ID NO: 48926 - DNA, 15 bp, Homo sapiens
ctacttgaacttaaa

SEQ ID NO: 48927 - DNA, 15 bp, Homo sapiens
tacttgaacttaaat

SEQ ID NO: 48928 - DNA, 15 bp, Homo sapiens
acttgaacttaaata

SEQ ID NO: 48929 - DNA, 15 bp, Homo sapiens
cttgaacttaaatac

SEQ ID NO: 48930 - DNA, 15 bp, Homo sapiens
ttgaacttaaatact

SEQ ID NO: 48931 - DNA, 15 bp, Homo sapiens
tgaacttaaatactt

SEQ ID NO: 48932 - DNA, 15 bp, Homo sapiens
gaacttaaatactta

SEQ ID NO: 48933 - DNA, 15 bp, Homo sapiens
aacttaaatacttaa

SEQ ID NO: 48934 - DNA, 15 bp, Homo sapiens
acttaaatacttaat

SEQ ID NO: 48935 - DNA, 15 bp, Homo sapiens
cttaaatacttaatt

SEQ ID NO: 48936 - DNA, 15 bp, Homo sapiens
ttaaatacttaattt

SEQ ID NO: 48937 - DNA, 15 bp, Homo sapiens
taaatacttaattta

SEQ ID NO: 48938 - DNA, 15 bp, Homo sapiens
aaatacttaatttaa

SEQ ID NO: 48939 - DNA, 15 bp, Homo sapiens
aatacttaatttaaa

SEQ ID NO: 48940 - DNA, 15 bp, Homo sapiens
atacttaatttaaat

SEQ ID NO: 48941 - DNA, 15 bp, Homo sapiens
tacttaatttaaatg

SEQ ID NO: 48942 - DNA, 15 bp, Homo sapiens
acttaatttaaatga

SEQ ID NO: 48943 - DNA, 15 bp, Homo sapiens
cttaatttaaatgaa

SEQ ID NO: 48944 - DNA, 15 bp, Homo sapiens
ttaatttaaatgaaa

SEQ ID NO: 48945 - DNA, 15 bp, Homo sapiens
taatttaaatgaaag

SEQ ID NO: 48946 - DNA, 15 bp, Homo sapiens
aatttaaatgaaagc

SEQ ID NO: 48947 - DNA, 15 bp, Homo sapiens
atttaaatgaaagct

SEQ ID NO: 48948 - DNA, 15 bp, Homo sapiens
tttaaatgaaagctt

SEQ ID NO: 48949 - DNA, 15 bp, Homo sapiens
ttaaatgaaagcttc

SEQ ID NO: 48950 - DNA, 15 bp, Homo sapiens
taaatgaaagcttcc

SEQ ID NO: 48951 - DNA, 15 bp, Homo sapiens
aaatgaaagcttcca

SEQ ID NO: 48952 - DNA, 15 bp, Homo sapiens
aatgaaagcttccac

SEQ ID NO: 48953 - DNA, 15 bp, Homo sapiens
atgaaagcttccaca

SEQ ID NO: 48954 - DNA, 15 bp, Homo sapiens
tgaaagcttccacac

SEQ ID NO: 48955 - DNA, 15 bp, Homo sapiens
gaaagcttccacact

SEQ ID NO: 48956 - DNA, 15 bp, Homo sapiens
aaagcttccacactt

SEQ ID NO: 48957 - DNA, 15 bp, Homo sapiens
aagcttccacactta

SEQ ID NO: 48958 - DNA, 15 bp, Homo sapiens
agcttccacacttat

SEQ ID NO: 48959 - DNA, 15 bp, Homo sapiens
gcttccacacttatc

SEQ ID NO: 48960 - DNA, 15 bp, Homo sapiens
cttccacacttatct

SEQ ID NO: 48961 - DNA, 15 bp, Homo sapiens
ttccacacttatctg

SEQ ID NO: 48962 - DNA, 15 bp, Homo sapiens
tccacacttatctga

SEQ ID NO: 48963 - DNA, 15 bp, Homo sapiens
ccacacttatctgac

SEQ ID NO: 48964 - DNA, 15 bp, Homo sapiens
cacacttatctgacc

SEQ ID NO: 48965 - DNA, 15 bp, Homo sapiens
acacttatctgacca

SEQ ID NO: 48966 - DNA, 15 bp, Homo sapiens
cacttatctgaccag

SEQ ID NO: 48967 - DNA, 15 bp, Homo sapiens
acttatctgaccaga

SEQ ID NO: 48968 - DNA, 15 bp, Homo sapiens
cttatctgaccagat

SEQ ID NO: 48969 - DNA, 15 bp, Homo sapiens
ttatctgaccagata

SEQ ID NO: 48970 - DNA, 15 bp, Homo sapiens
tatctgaccagatac

SEQ ID NO: 48971 - DNA, 15 bp, Homo sapiens
atctgaccagatact

SEQ ID NO: 48972 - DNA, 15 bp, Homo sapiens
tctgaccagatactc

SEQ ID NO: 48973 - DNA, 15 bp, Homo sapiens
ctgaccagatactca

SEQ ID NO: 48974 - DNA, 15 bp, Homo sapiens
tgaccagatactcaa

SEQ ID NO: 48975 - DNA, 15 bp, Homo sapiens
gaccagatactcaaa

SEQ ID NO: 48976 - DNA, 15 bp, Homo sapiens
accagatactcaaat

SEQ ID NO: 48977 - DNA, 15 bp, Homo sapiens
ccagatactcaaatt

SEQ ID NO: 48978 - DNA, 15 bp, Homo sapiens
cagatactcaaattt

SEQ ID NO: 48979 - DNA, 15 bp, Homo sapiens
agatactcaaatttt

SEQ ID NO: 48980 - DNA, 15 bp, Homo sapiens
gatactcaaattttt

SEQ ID NO: 48981 - DNA, 15 bp, Homo sapiens
atactcaaatttttc

SEQ ID NO: 48982 - DNA, 15 bp, Homo sapiens
tactcaaatttttct

SEQ ID NO: 48983 - DNA, 15 bp, Homo sapiens
actcaaatttttcta

SEQ ID NO: 48984 - DNA, 15 bp, Homo sapiens
ctcaaatttttctac

SEQ ID NO: 48985 - DNA, 15 bp, Homo sapiens
tcaaatttttctaca

SEQ ID NO: 48986 - DNA, 15 bp, Homo sapiens
caaatttttctacag

SEQ ID NO: 48987 - DNA, 15 bp, Homo sapiens
aaatttttctacaga

SEQ ID NO: 48988 - DNA, 15 bp, Homo sapiens
aatttttctacagaa

SEQ ID NO: 48989 - DNA, 15 bp, Homo sapiens
atttttctacagaaa

SEQ ID NO: 48990 - DNA, 15 bp, Homo sapiens
tttttctacagaaaa

SEQ ID NO: 48991 - DNA, 15 bp, Homo sapiens
ttttctacagaaaag

SEQ ID NO: 48992 - DNA, 15 bp, Homo sapiens
tttctacagaaaaga

SEQ ID NO: 48993 - DNA, 15 bp, Homo sapiens
ttctacagaaaagag

SEQ ID NO: 48994 - DNA, 15 bp, Homo sapiens
tctacagaaaagaga

SEQ ID NO: 48995 - DNA, 15 bp, Homo sapiens
ctacagaaaagagaa

SEQ ID NO: 48996 - DNA, 15 bp, Homo sapiens
tacagaaaagagaat

SEQ ID NO: 48997 - DNA, 15 bp, Homo sapiens
acagaaaagagaata

SEQ ID NO: 48998 - DNA, 15 bp, Homo sapiens
cagaaaagagaatac

SEQ ID NO: 48999 - DNA, 15 bp, Homo sapiens
agaaaagagaatacc

SEQ ID NO: 49000 - DNA, 15 bp, Homo sapiens
gaaaagagaatacct

SEQ ID NO: 49001 - DNA, 15 bp, Homo sapiens
aaaagagaatacctt

SEQ ID NO: 49002 - DNA, 15 bp, Homo sapiens
aaagagaataccttc

SEQ ID NO: 49003 - DNA, 15 bp, Homo sapiens
aagagaataccttcc

SEQ ID NO: 49004 - DNA, 15 bp, Homo sapiens
agagaataccttcct

SEQ ID NO: 49005 - DNA, 15 bp, Homo sapiens
gagaataccttcctg

SEQ ID NO: 49006 - DNA, 15 bp, Homo sapiens
agaataccttcctgt

SEQ ID NO: 49007 - DNA, 15 bp, Homo sapiens
gaataccttcctgtt

SEQ ID NO: 49008 - DNA, 15 bp, Homo sapiens
aataccttcctgttc

SEQ ID NO: 49009 - DNA, 15 bp, Homo sapiens
ataccttcctgttcc

SEQ ID NO: 49010 - DNA, 15 bp, Homo sapiens
taccttcctgttcca

SEQ ID NO: 49011 - DNA, 15 bp, Homo sapiens
accttcctgttccac

SEQ ID NO: 49012 - DNA, 15 bp, Homo sapiens
ccttcctgttccact

SEQ ID NO: 49013 - DNA, 15 bp, Homo sapiens
cttcctgttccactt

SEQ ID NO: 49014 - DNA, 15 bp, Homo sapiens
ttcctgttccactta

SEQ ID NO: 49015 - DNA, 15 bp, Homo sapiens
tcctgttccacttaa

SEQ ID NO: 49016 - DNA, 15 bp, Homo sapiens
cctgttccacttaaa

SEQ ID NO: 49017 - DNA, 15 bp, Homo sapiens
ctgttccacttaaag

SEQ ID NO: 49018 - DNA, 15 bp, Homo sapiens
tgttccacttaaaga

SEQ ID NO: 49019 - DNA, 15 bp, Homo sapiens
gttccacttaaagaa

SEQ ID NO: 49020 - DNA, 15 bp, Homo sapiens
ttccacttaaagaac

SEQ ID NO: 49021 - DNA, 15 bp, Homo sapiens
tccacttaaagaaca

SEQ ID NO: 49022 - DNA, 15 bp, Homo sapiens
ccacttaaagaacac

SEQ ID NO: 49023 - DNA, 15 bp, Homo sapiens
cacttaaagaacaca

SEQ ID NO: 49024 - DNA, 15 bp, Homo sapiens
acttaaagaacacac

SEQ ID NO: 49025 - DNA, 15 bp, Homo sapiens
cttaaagaacacaca

SEQ ID NO: 49026 - DNA, 15 bp, Homo sapiens
ttaaagaacacacac

SEQ ID NO: 49027 - DNA, 15 bp, Homo sapiens
taaagaacacacaca

SEQ ID NO: 49028 - DNA, 15 bp, Homo sapiens
aaagaacacacacat

SEQ ID NO: 49029 - DNA, 15 bp, Homo sapiens
aagaacacacacatt

SEQ ID NO: 49030 - DNA, 15 bp, Homo sapiens
agaacacacacattt

SEQ ID NO: 49031 - DNA, 15 bp, Homo sapiens
gaacacacacattta

SEQ ID NO: 49032 - DNA, 15 bp, Homo sapiens
aacacacacatttac

SEQ ID NO: 49033 - DNA, 15 bp, Homo sapiens
acacacacatttacc

SEQ ID NO: 49034 - DNA, 15 bp, Homo sapiens
cacacacatttacca

SEQ ID NO: 49035 - DNA, 15 bp, Homo sapiens
acacacatttaccac

SEQ ID NO: 49036 - DNA, 15 bp, Homo sapiens
cacacatttaccact

SEQ ID NO: 49037 - DNA, 15 bp, Homo sapiens
acacatttaccactc

SEQ ID NO: 49038 - DNA, 15 bp, Homo sapiens
cacatttaccactcc

SEQ ID NO: 49039 - DNA, 15 bp, Homo sapiens
acatttaccactccc

SEQ ID NO: 49040 - DNA, 15 bp, Homo sapiens
catttaccactcccc

SEQ ID NO: 49041 - DNA, 15 bp, Homo sapiens
atttaccactccccc

SEQ ID NO: 49042 - DNA, 15 bp, Homo sapiens
tttaccactccccct

SEQ ID NO: 49043 - DNA, 15 bp, Homo sapiens
ttaccactccccctc

SEQ ID NO: 49044 - DNA, 15 bp, Homo sapiens
taccactccccctcc

SEQ ID NO: 49045 - DNA, 15 bp, Homo sapiens
accactccccctcct

SEQ ID NO: 49046 - DNA, 15 bp, Homo sapiens
ccactccccctcctc

SEQ ID NO: 49047 - DNA, 15 bp, Homo sapiens
cactccccctcctct

SEQ ID NO: 49048 - DNA, 15 bp, Homo sapiens
actccccctcctctc

SEQ ID NO: 49049 - DNA, 15 bp, Homo sapiens
ctccccctcctctcc

SEQ ID NO: 49050 - DNA, 15 bp, Homo sapiens
tccccctcctctccc

SEQ ID NO: 49051 - DNA, 15 bp, Homo sapiens
ccccctcctctcccc

SEQ ID NO: 49052 - DNA, 15 bp, Homo sapiens
cccctcctctcccct

SEQ ID NO: 49053 - DNA, 15 bp, Homo sapiens
ccctcctctcccctg

SEQ ID NO: 49054 - DNA, 15 bp, Homo sapiens
cctcctctcccctgc

SEQ ID NO: 49055 - DNA, 15 bp, Homo sapiens
ctcctctcccctgca

SEQ ID NO: 49056 - DNA, 15 bp, Homo sapiens
tcctctcccctgcaa

SEQ ID NO: 49057 - DNA, 15 bp, Homo sapiens
cctctcccctgcaaa

SEQ ID NO: 49058 - DNA, 15 bp, Homo sapiens
ctctcccctgcaaaa

SEQ ID NO: 49059 - DNA, 15 bp, Homo sapiens
tctcccctgcaaaag

SEQ ID NO: 49060 - DNA, 15 bp, Homo sapiens
ctcccctgcaaaagg

SEQ ID NO: 49061 - DNA, 15 bp, Homo sapiens
tcccctgcaaaaggt

SEQ ID NO: 49062 - DNA, 15 bp, Homo sapiens
cccctgcaaaaggtt

SEQ ID NO: 49063 - DNA, 15 bp, Homo sapiens
ccctgcaaaaggttt

SEQ ID NO: 49064 - DNA, 15 bp, Homo sapiens
cctgcaaaaggtttt

SEQ ID NO: 49065 - DNA, 15 bp, Homo sapiens
ctgcaaaaggttttc

SEQ ID NO: 49066 - DNA, 15 bp, Homo sapiens
tgcaaaaggttttca

SEQ ID NO: 49067 - DNA, 15 bp, Homo sapiens
gcaaaaggttttcaa

SEQ ID NO: 49068 - DNA, 15 bp, Homo sapiens
caaaaggttttcaat

SEQ ID NO: 49069 - DNA, 15 bp, Homo sapiens
aaaaggttttcaatg

SEQ ID NO: 49070 - DNA, 15 bp, Homo sapiens
aaaggttttcaatgt

SEQ ID NO: 49071 - DNA, 15 bp, Homo sapiens
aaggttttcaatgtc

SEQ ID NO: 49072 - DNA, 15 bp, Homo sapiens
aggttttcaatgtca

SEQ ID NO: 49073 - DNA, 15 bp, Homo sapiens
ggttttcaatgtcag

SEQ ID NO: 49074 - DNA, 15 bp, Homo sapiens
gttttcaatgtcagt

SEQ ID NO: 49075 - DNA, 15 bp, Homo sapiens
ttttcaatgtcagta

SEQ ID NO: 49076 - DNA, 15 bp, Homo sapiens
tttcaatgtcagtac

SEQ ID NO: 49077 - DNA, 15 bp, Homo sapiens
ttcaatgtcagtaca

SEQ ID NO: 49078 - DNA, 15 bp, Homo sapiens
tcaatgtcagtacat

SEQ ID NO: 49079 - DNA, 15 bp, Homo sapiens
caatgtcagtacatt

SEQ ID NO: 49080 - DNA, 15 bp, Homo sapiens
aatgtcagtacatta

SEQ ID NO: 49081 - DNA, 15 bp, Homo sapiens
atgtcagtacattag

SEQ ID NO: 49082 - DNA, 15 bp, Homo sapiens
tgtcagtacattagt

SEQ ID NO: 49083 - DNA, 15 bp, Homo sapiens
gtcagtacattagtg

SEQ ID NO: 49084 - DNA, 15 bp, Homo sapiens
tcagtacattagtga

SEQ ID NO: 49085 - DNA, 15 bp, Homo sapiens
cagtacattagtgag

SEQ ID NO: 49086 - DNA, 15 bp, Homo sapiens
agtacattagtgagc

SEQ ID NO: 49087 - DNA, 15 bp, Homo sapiens
gtacattagtgagct

SEQ ID NO: 49088 - DNA, 15 bp, Homo sapiens
tacattagtgagctc

SEQ ID NO: 49089 - DNA, 15 bp, Homo sapiens
acattagtgagctcc

SEQ ID NO: 49090 - DNA, 15 bp, Homo sapiens
cattagtgagctcca

SEQ ID NO: 49091 - DNA, 15 bp, Homo sapiens
attagtgagctccat

SEQ ID NO: 49092 - DNA, 15 bp, Homo sapiens
ttagtgagctccatt

SEQ ID NO: 49093 - DNA, 15 bp, Homo sapiens
tagtgagctccattt

SEQ ID NO: 49094 - DNA, 15 bp, Homo sapiens
agtgagctccatttt

SEQ ID NO: 49095 - DNA, 15 bp, Homo sapiens
gtgagctccattttg

SEQ ID NO: 49096 - DNA, 15 bp, Homo sapiens
tgagctccattttgc

SEQ ID NO: 49097 - DNA, 15 bp, Homo sapiens
gagctccattttgca

SEQ ID NO: 49098 - DNA, 15 bp, Homo sapiens
agctccattttgcat

SEQ ID NO: 49099 - DNA, 15 bp, Homo sapiens
gctccattttgcatc

SEQ ID NO: 49100 - DNA, 15 bp, Homo sapiens
ctccattttgcatct

SEQ ID NO: 49101 - DNA, 15 bp, Homo sapiens
tccattttgcatctg

SEQ ID NO: 49102 - DNA, 15 bp, Homo sapiens
ccattttgcatctgc

SEQ ID NO: 49103 - DNA, 15 bp, Homo sapiens
cattttgcatctgcc

SEQ ID NO: 49104 - DNA, 15 bp, Homo sapiens
attttgcatctgcca

SEQ ID NO: 49105 - DNA, 15 bp, Homo sapiens
ttttgcatctgccat

SEQ ID NO: 49106 - DNA, 15 bp, Homo sapiens
tttgcatctgccatc

SEQ ID NO: 49107 - DNA, 15 bp, Homo sapiens
ttgcatctgccatca

SEQ ID NO: 49108 - DNA, 15 bp, Homo sapiens
tgcatctgccatcaa

SEQ ID NO: 49109 - DNA, 15 bp, Homo sapiens
gcatctgccatcaat

SEQ ID NO: 49110 - DNA, 15 bp, Homo sapiens
catctgccatcaata

SEQ ID NO: 49111 - DNA, 15 bp, Homo sapiens
atctgccatcaataa

SEQ ID NO: 49112 - DNA, 15 bp, Homo sapiens
tctgccatcaataat

SEQ ID NO: 49113 - DNA, 15 bp, Homo sapiens
ctgccatcaataatg

SEQ ID NO: 49114 - DNA, 15 bp, Homo sapiens
tgccatcaataatga

SEQ ID NO: 49115 - DNA, 15 bp, Homo sapiens
gccatcaataatgat

SEQ ID NO: 49116 - DNA, 15 bp, Homo sapiens
ccatcaataatgatt

SEQ ID NO: 49117 - DNA, 15 bp, Homo sapiens
catcaataatgattc

SEQ ID NO: 49118 - DNA, 15 bp, Homo sapiens
atcaataatgattcc

SEQ ID NO: 49119 - DNA, 15 bp, Homo sapiens
tcaataatgattcca

SEQ ID NO: 49120 - DNA, 15 bp, Homo sapiens
caataatgattccat

SEQ ID NO: 49121 - DNA, 15 bp, Homo sapiens
aataatgattccata

SEQ ID NO: 49122 - DNA, 15 bp, Homo sapiens
ataatgattccatat

SEQ ID NO: 49123 - DNA, 15 bp, Homo sapiens
taatgattccatata

SEQ ID NO: 49124 - DNA, 15 bp, Homo sapiens
aatgattccatatag

SEQ ID NO: 49125 - DNA, 15 bp, Homo sapiens
atgattccatatagt

SEQ ID NO: 49126 - DNA, 15 bp, Homo sapiens
tgattccatatagtc

SEQ ID NO: 49127 - DNA, 15 bp, Homo sapiens
gattccatatagtca

SEQ ID NO: 49128 - DNA, 15 bp, Homo sapiens
attccatatagtcaa

SEQ ID NO: 49129 - DNA, 15 bp, Homo sapiens
ttccatatagtcaat

SEQ ID NO: 49130 - DNA, 15 bp, Homo sapiens
tccatatagtcaata

SEQ ID NO: 49131 - DNA, 15 bp, Homo sapiens
ccatatagtcaataa

SEQ ID NO: 49132 - DNA, 15 bp, Homo sapiens
catatagtcaataat

SEQ ID NO: 49133 - DNA, 15 bp, Homo sapiens
atatagtcaataatt

SEQ ID NO: 49134 - DNA, 15 bp, Homo sapiens
tatagtcaataattg

SEQ ID NO: 49135 - DNA, 15 bp, Homo sapiens
atagtcaataattgg

SEQ ID NO: 49136 - DNA, 15 bp, Homo sapiens
tagtcaataattggg

SEQ ID NO: 49137 - DNA, 15 bp, Homo sapiens
agtcaataattgggt

SEQ ID NO: 49138 - DNA, 15 bp, Homo sapiens
gtcaataattgggtt

SEQ ID NO: 49139 - DNA, 15 bp, Homo sapiens
tcaataattgggttc

SEQ ID NO: 49140 - DNA, 15 bp, Homo sapiens
caataattgggttca

SEQ ID NO: 49141 - DNA, 15 bp, Homo sapiens
aataattgggttcat

SEQ ID NO: 49142 - DNA, 15 bp, Homo sapiens
ataattgggttcatg

SEQ ID NO: 49143 - DNA, 15 bp, Homo sapiens
taattgggttcatga

SEQ ID NO: 49144 - DNA, 15 bp, Homo sapiens
aattgggttcatgac

SEQ ID NO: 49145 - DNA, 15 bp, Homo sapiens
attgggttcatgacc

SEQ ID NO: 49146 - DNA, 15 bp, Homo sapiens
ttgggttcatgacct

SEQ ID NO: 49147 - DNA, 15 bp, Homo sapiens
tgggttcatgacctt

SEQ ID NO: 49148 - DNA, 15 bp, Homo sapiens
gggttcatgaccttt

SEQ ID NO: 49149 - DNA, 15 bp, Homo sapiens
ggttcatgacctttc

SEQ ID NO: 49150 - DNA, 15 bp, Homo sapiens
gttcatgacctttct

SEQ ID NO: 49151 - DNA, 15 bp, Homo sapiens
ttcatgacctttcta

SEQ ID NO: 49152 - DNA, 15 bp, Homo sapiens
tcatgacctttctaa

SEQ ID NO: 49153 - DNA, 15 bp, Homo sapiens
catgacctttctaaa

SEQ ID NO: 49154 - DNA, 15 bp, Homo sapiens
atgacctttctaaat

SEQ ID NO: 49155 - DNA, 15 bp, Homo sapiens
tgacctttctaaatc

SEQ ID NO: 49156 - DNA, 15 bp, Homo sapiens
gacctttctaaatct

SEQ ID NO: 49157 - DNA, 15 bp, Homo sapiens
acctttctaaatctt

SEQ ID NO: 49158 - DNA, 15 bp, Homo sapiens
cctttctaaatcttt

SEQ ID NO: 49159 - DNA, 15 bp, Homo sapiens
ctttctaaatcttta

SEQ ID NO: 49160 - DNA, 15 bp, Homo sapiens
tttctaaatctttac

SEQ ID NO: 49161 - DNA, 15 bp, Homo sapiens
ttctaaatctttaca

SEQ ID NO: 49162 - DNA, 15 bp, Homo sapiens
tctaaatctttacag

SEQ ID NO: 49163 - DNA, 15 bp, Homo sapiens
ctaaatctttacagt

SEQ ID NO: 49164 - DNA, 15 bp, Homo sapiens
taaatctttacagtg

SEQ ID NO: 49165 - DNA, 15 bp, Homo sapiens
aaatctttacagtgt

SEQ ID NO: 49166 - DNA, 15 bp, Homo sapiens
aatctttacagtgta

SEQ ID NO: 49167 - DNA, 15 bp, Homo sapiens
atctttacagtgtaa

SEQ ID NO: 49168 - DNA, 15 bp, Homo sapiens
tctttacagtgtaaa

SEQ ID NO: 49169 - DNA, 15 bp, Homo sapiens
ctttacagtgtaaat

SEQ ID NO: 49170 - DNA, 15 bp, Homo sapiens
tttacagtgtaaata

SEQ ID NO: 49171 - DNA, 15 bp, Homo sapiens
ttacagtgtaaatat

SEQ ID NO: 49172 - DNA, 15 bp, Homo sapiens
tacagtgtaaatatt

SEQ ID NO: 49173 - DNA, 15 bp, Homo sapiens
acagtgtaaatattc

SEQ ID NO: 49174 - DNA, 15 bp, Homo sapiens
cagtgtaaatattct

SEQ ID NO: 49175 - DNA, 15 bp, Homo sapiens
agtgtaaatattctg

SEQ ID NO: 49176 - DNA, 15 bp, Homo sapiens
gtgtaaatattctgg

SEQ ID NO: 49177 - DNA, 15 bp, Homo sapiens
tgtaaatattctgga

SEQ ID NO: 49178 - DNA, 15 bp, Homo sapiens
gtaaatattctggaa

SEQ ID NO: 49179 - DNA, 15 bp, Homo sapiens
taaatattctggaaa

SEQ ID NO: 49180 - DNA, 15 bp, Homo sapiens
aaatattctggaaat

SEQ ID NO: 49181 - DNA, 15 bp, Homo sapiens
aatattctggaaatc

SEQ ID NO: 49182 - DNA, 15 bp, Homo sapiens
atattctggaaatcc

SEQ ID NO: 49183 - DNA, 15 bp, Homo sapiens
tattctggaaatcca

SEQ ID NO: 49184 - DNA, 15 bp, Homo sapiens
attctggaaatccag

SEQ ID NO: 49185 - DNA, 15 bp, Homo sapiens
ttctggaaatccagt

SEQ ID NO: 49186 - DNA, 15 bp, Homo sapiens
tctggaaatccagtg

SEQ ID NO: 49187 - DNA, 15 bp, Homo sapiens
ctggaaatccagtga

SEQ ID NO: 49188 - DNA, 15 bp, Homo sapiens
tggaaatccagtgag

SEQ ID NO: 49189 - DNA, 15 bp, Homo sapiens
ggaaatccagtgagg

SEQ ID NO: 49190 - DNA, 15 bp, Homo sapiens
gaaatccagtgaggc

SEQ ID NO: 49191 - DNA, 15 bp, Homo sapiens
aaatccagtgaggca

SEQ ID NO: 49192 - DNA, 15 bp, Homo sapiens
aatccagtgaggcac

SEQ ID NO: 49193 - DNA, 15 bp, Homo sapiens
atccagtgaggcact

SEQ ID NO: 49194 - DNA, 15 bp, Homo sapiens
tccagtgaggcactt

SEQ ID NO: 49195 - DNA, 15 bp, Homo sapiens
ccagtgaggcactta

SEQ ID NO: 49196 - DNA, 15 bp, Homo sapiens
cagtgaggcacttaa

SEQ ID NO: 49197 - DNA, 15 bp, Homo sapiens
agtgaggcacttaag

SEQ ID NO: 49198 - DNA, 15 bp, Homo sapiens
gtgaggcacttaagt

SEQ ID NO: 49199 - DNA, 15 bp, Homo sapiens
tgaggcacttaagta

SEQ ID NO: 49200 - DNA, 15 bp, Homo sapiens
gaggcacttaagtat

SEQ ID NO: 49201 - DNA, 15 bp, Homo sapiens
aggcacttaagtata

SEQ ID NO: 49202 - DNA, 15 bp, Homo sapiens
ggcacttaagtataa

SEQ ID NO: 49203 - DNA, 15 bp, Homo sapiens
gcacttaagtataaa

SEQ ID NO: 49204 - DNA, 15 bp, Homo sapiens
cacttaagtataaaa

SEQ ID NO: 49205 - DNA, 15 bp, Homo sapiens
acttaagtataaaat

SEQ ID NO: 49206 - DNA, 15 bp, Homo sapiens
cttaagtataaaatt

SEQ ID NO: 49207 - DNA, 15 bp, Homo sapiens
ttaagtataaaatta

SEQ ID NO: 49208 - DNA, 15 bp, Homo sapiens
taagtataaaattat

SEQ ID NO: 49209 - DNA, 15 bp, Homo sapiens
aagtataaaattatt

SEQ ID NO: 49210 - DNA, 15 bp, Homo sapiens
agtataaaattattt

SEQ ID NO: 49211 - DNA, 15 bp, Homo sapiens
gtataaaattattta

SEQ ID NO: 49212 - DNA, 15 bp, Homo sapiens
tataaaattatttag

SEQ ID NO: 49213 - DNA, 15 bp, Homo sapiens
ataaaattatttagg

SEQ ID NO: 49214 - DNA, 15 bp, Homo sapiens
taaaattatttagga

SEQ ID NO: 49215 - DNA, 15 bp, Homo sapiens
aaaattatttaggat

SEQ ID NO: 49216 - DNA, 15 bp, Homo sapiens
aaattatttaggatt

SEQ ID NO: 49217 - DNA, 15 bp, Homo sapiens
aattatttaggatta

SEQ ID NO: 49218 - DNA, 15 bp, Homo sapiens
attatttaggattaa

SEQ ID NO: 49219 - DNA, 15 bp, Homo sapiens
ttatttaggattaaa

SEQ ID NO: 49220 - DNA, 15 bp, Homo sapiens
tatttaggattaaat

SEQ ID NO: 49221 - DNA, 15 bp, Homo sapiens
atttaggattaaata

SEQ ID NO: 49222 - DNA, 15 bp, Homo sapiens
tttaggattaaataa

SEQ ID NO: 49223 - DNA, 15 bp, Homo sapiens
ttaggattaaataat

SEQ ID NO: 49224 - DNA, 15 bp, Homo sapiens
taggattaaataatt

SEQ ID NO: 49225 - DNA, 15 bp, Homo sapiens
aggattaaataattc

SEQ ID NO: 49226 - DNA, 15 bp, Homo sapiens
ggattaaataattct

SEQ ID NO: 49227 - DNA, 15 bp, Homo sapiens
gattaaataattcta

SEQ ID NO: 49228 - DNA, 15 bp, Homo sapiens
attaaataattctat

SEQ ID NO: 49229 - DNA, 15 bp, Homo sapiens
ttaaataattctatg

SEQ ID NO: 49230 - DNA, 15 bp, Homo sapiens
taaataattctatgc

SEQ ID NO: 49231 - DNA, 15 bp, Homo sapiens
aaataattctatgcc

SEQ ID NO: 49232 - DNA, 15 bp, Homo sapiens
aataattctatgcct

SEQ ID NO: 49233 - DNA, 15 bp, Homo sapiens
ataattctatgcctt

SEQ ID NO: 49234 - DNA, 15 bp, Homo sapiens
taattctatgcctta

SEQ ID NO: 49235 - DNA, 15 bp, Homo sapiens
aattctatgccttaa

SEQ ID NO: 49236 - DNA, 15 bp, Homo sapiens
attctatgccttaag

SEQ ID NO: 49237 - DNA, 15 bp, Homo sapiens
ttctatgccttaagt

SEQ ID NO: 49238 - DNA, 15 bp, Homo sapiens
tctatgccttaagta

SEQ ID NO: 49239 - DNA, 15 bp, Homo sapiens
ctatgccttaagtag

SEQ ID NO: 49240 - DNA, 15 bp, Homo sapiens
tatgccttaagtaga

SEQ ID NO: 49241 - DNA, 15 bp, Homo sapiens
atgccttaagtagaa

SEQ ID NO: 49242 - DNA, 15 bp, Homo sapiens
tgccttaagtagaag

SEQ ID NO: 49243 - DNA, 15 bp, Homo sapiens
gccttaagtagaagt

SEQ ID NO: 49244 - DNA, 15 bp, Homo sapiens
ccttaagtagaagtt

SEQ ID NO: 49245 - DNA, 15 bp, Homo sapiens
cttaagtagaagttt

SEQ ID NO: 49246 - DNA, 15 bp, Homo sapiens
ttaagtagaagttta

SEQ ID NO: 49247 - DNA, 15 bp, Homo sapiens
taagtagaagtttaa

SEQ ID NO: 49248 - DNA, 15 bp, Homo sapiens
aagtagaagtttaag

SEQ ID NO: 49249 - DNA, 15 bp, Homo sapiens
agtagaagtttaaga

SEQ ID NO: 49250 - DNA, 15 bp, Homo sapiens
gtagaagtttaagag

SEQ ID NO: 49251 - DNA, 15 bp, Homo sapiens
tagaagtttaagagg

SEQ ID NO: 49252 - DNA, 15 bp, Homo sapiens
agaagtttaagagga

SEQ ID NO: 49253 - DNA, 15 bp, Homo sapiens
gaagtttaagaggac

SEQ ID NO: 49254 - DNA, 15 bp, Homo sapiens
aagtttaagaggacg

SEQ ID NO: 49255 - DNA, 15 bp, Homo sapiens
agtttaagaggacgt

SEQ ID NO: 49256 - DNA, 15 bp, Homo sapiens
gtttaagaggacgtt

SEQ ID NO: 49257 - DNA, 15 bp, Homo sapiens
tttaagaggacgttt

SEQ ID NO: 49258 - DNA, 15 bp, Homo sapiens
ttaagaggacgttta

SEQ ID NO: 49259 - DNA, 15 bp, Homo sapiens
taagaggacgtttag

SEQ ID NO: 49260 - DNA, 15 bp, Homo sapiens
aagaggacgtttagg

SEQ ID NO: 49261 - DNA, 15 bp, Homo sapiens
agaggacgtttagga

SEQ ID NO: 49262 - DNA, 15 bp, Homo sapiens
gaggacgtttaggac

SEQ ID NO: 49263 - DNA, 15 bp, Homo sapiens
aggacgtttaggaca

SEQ ID NO: 49264 - DNA, 15 bp, Homo sapiens
ggacgtttaggacac

SEQ ID NO: 49265 - DNA, 15 bp, Homo sapiens
gacgtttaggacaca

SEQ ID NO: 49266 - DNA, 15 bp, Homo sapiens
acgtttaggacacac

SEQ ID NO: 49267 - DNA, 15 bp, Homo sapiens
cgtttaggacacaca

SEQ ID NO: 49268 - DNA, 15 bp, Homo sapiens
gtttaggacacacat

SEQ ID NO: 49269 - DNA, 15 bp, Homo sapiens
tttaggacacacatg

SEQ ID NO: 49270 - DNA, 15 bp, Homo sapiens
ttaggacacacatga

SEQ ID NO: 49271 - DNA, 15 bp, Homo sapiens
taggacacacatgac

SEQ ID NO: 49272 - DNA, 15 bp, Homo sapiens
aggacacacatgact

SEQ ID NO: 49273 - DNA, 15 bp, Homo sapiens
ggacacacatgacta

SEQ ID NO: 49274 - DNA, 15 bp, Homo sapiens
gacacacatgactaa

SEQ ID NO: 49275 - DNA, 15 bp, Homo sapiens
acacacatgactaag

SEQ ID NO: 49276 - DNA, 15 bp, Homo sapiens
cacacatgactaagc

SEQ ID NO: 49277 - DNA, 15 bp, Homo sapiens
acacatgactaagcc

SEQ ID NO: 49278 - DNA, 15 bp, Homo sapiens
cacatgactaagcct

SEQ ID NO: 49279 - DNA, 15 bp, Homo sapiens
acatgactaagccta

SEQ ID NO: 49280 - DNA, 15 bp, Homo sapiens
catgactaagcctac

SEQ ID NO: 49281 - DNA, 15 bp, Homo sapiens
atgactaagcctaca

SEQ ID NO: 49282 - DNA, 15 bp, Homo sapiens
tgactaagcctacaa

SEQ ID NO: 49283 - DNA, 15 bp, Homo sapiens
gactaagcctacaaa

SEQ ID NO: 49284 - DNA, 15 bp, Homo sapiens
actaagcctacaaat

SEQ ID NO: 49285 - DNA, 15 bp, Homo sapiens
ctaagcctacaaata

SEQ ID NO: 49286 - DNA, 15 bp, Homo sapiens
taagcctacaaatac

SEQ ID NO: 49287 - DNA, 15 bp, Homo sapiens
aagcctacaaatacc

SEQ ID NO: 49288 - DNA, 15 bp, Homo sapiens
agcctacaaatacca

SEQ ID NO: 49289 - DNA, 15 bp, Homo sapiens
gcctacaaataccaa

SEQ ID NO: 49290 - DNA, 15 bp, Homo sapiens
cctacaaataccaaa

SEQ ID NO: 49291 - DNA, 15 bp, Homo sapiens
ctacaaataccaaag

SEQ ID NO: 49292 - DNA, 15 bp, Homo sapiens
tacaaataccaaagc

SEQ ID NO: 49293 - DNA, 15 bp, Homo sapiens
acaaataccaaagcc

SEQ ID NO: 49294 - DNA, 15 bp, Homo sapiens
caaataccaaagcca

SEQ ID NO: 49295 - DNA, 15 bp, Homo sapiens
aaataccaaagccac

SEQ ID NO: 49296 - DNA, 15 bp, Homo sapiens
aataccaaagccact

SEQ ID NO: 49297 - DNA, 15 bp, Homo sapiens
ataccaaagccactc

SEQ ID NO: 49298 - DNA, 15 bp, Homo sapiens
taccaaagccactct

SEQ ID NO: 49299 - DNA, 15 bp, Homo sapiens
accaaagccactcta

SEQ ID NO: 49300 - DNA, 15 bp, Homo sapiens
ccaaagccactctat

SEQ ID NO: 49301 - DNA, 15 bp, Homo sapiens
caaagccactctatg

SEQ ID NO: 49302 - DNA, 15 bp, Homo sapiens
aaagccactctatgt

SEQ ID NO: 49303 - DNA, 15 bp, Homo sapiens
aagccactctatgtt

SEQ ID NO: 49304 - DNA, 15 bp, Homo sapiens
agccactctatgttt

SEQ ID NO: 49305 - DNA, 15 bp, Homo sapiens
gccactctatgtttc

SEQ ID NO: 49306 - DNA, 15 bp, Homo sapiens
ccactctatgtttcc

SEQ ID NO: 49307 - DNA, 15 bp, Homo sapiens
cactctatgtttcct

SEQ ID NO: 49308 - DNA, 15 bp, Homo sapiens
actctatgtttccta

SEQ ID NO: 49309 - DNA, 15 bp, Homo sapiens
ctctatgtttcctag

SEQ ID NO: 49310 - DNA, 15 bp, Homo sapiens
tctatgtttcctagg

SEQ ID NO: 49311 - DNA, 15 bp, Homo sapiens
ctatgtttcctaggt

SEQ ID NO: 49312 - DNA, 15 bp, Homo sapiens
tatgtttcctaggtt

SEQ ID NO: 49313 - DNA, 15 bp, Homo sapiens
atgtttcctaggttt

SEQ ID NO: 49314 - DNA, 15 bp, Homo sapiens
tgtttcctaggttta

SEQ ID NO: 49315 - DNA, 15 bp, Homo sapiens
gtttcctaggtttaa

SEQ ID NO: 49316 - DNA, 15 bp, Homo sapiens
tttcctaggtttaaa

SEQ ID NO: 49317 - DNA, 15 bp, Homo sapiens
ttcctaggtttaaat

SEQ ID NO: 49318 - DNA, 15 bp, Homo sapiens
tcctaggtttaaata

SEQ ID NO: 49319 - DNA, 15 bp, Homo sapiens
cctaggtttaaatac

SEQ ID NO: 49320 - DNA, 15 bp, Homo sapiens
ctaggtttaaatacc

SEQ ID NO: 49321 - DNA, 15 bp, Homo sapiens
taggtttaaatacca

SEQ ID NO: 49322 - DNA, 15 bp, Homo sapiens
aggtttaaataccac

SEQ ID NO: 49323 - DNA, 15 bp, Homo sapiens
ggtttaaataccaca

SEQ ID NO: 49324 - DNA, 15 bp, Homo sapiens
gtttaaataccacat

SEQ ID NO: 49325 - DNA, 15 bp, Homo sapiens
tttaaataccacatg

SEQ ID NO: 49326 - DNA, 15 bp, Homo sapiens
ttaaataccacatgc

SEQ ID NO: 49327 - DNA, 15 bp, Homo sapiens
taaataccacatgca

SEQ ID NO: 49328 - DNA, 15 bp, Homo sapiens
aaataccacatgcaa

SEQ ID NO: 49329 - DNA, 15 bp, Homo sapiens
aataccacatgcaaa

SEQ ID NO: 49330 - DNA, 15 bp, Homo sapiens
ataccacatgcaaat

SEQ ID NO: 49331 - DNA, 15 bp, Homo sapiens
taccacatgcaaata

SEQ ID NO: 49332 - DNA, 15 bp, Homo sapiens
accacatgcaaataa

SEQ ID NO: 49333 - DNA, 15 bp, Homo sapiens
ccacatgcaaataac

SEQ ID NO: 49334 - DNA, 15 bp, Homo sapiens
cacatgcaaataaca

SEQ ID NO: 49335 - DNA, 15 bp, Homo sapiens
acatgcaaataacat

SEQ ID NO: 49336 - DNA, 15 bp, Homo sapiens
catgcaaataacata

SEQ ID NO: 49337 - DNA, 15 bp, Homo sapiens
atgcaaataacatac

SEQ ID NO: 49338 - DNA, 15 bp, Homo sapiens
tgcaaataacatacg

SEQ ID NO: 49339 - DNA, 15 bp, Homo sapiens
gcaaataacatacgg

SEQ ID NO: 49340 - DNA, 15 bp, Homo sapiens
caaataacatacgga

SEQ ID NO: 49341 - DNA, 15 bp, Homo sapiens
aaataacatacggat

SEQ ID NO: 49342 - DNA, 15 bp, Homo sapiens
aataacatacggatt

SEQ ID NO: 49343 - DNA, 15 bp, Homo sapiens
ataacatacggattt

SEQ ID NO: 49344 - DNA, 15 bp, Homo sapiens
taacatacggatttc

SEQ ID NO: 49345 - DNA, 15 bp, Homo sapiens
aacatacggatttca

SEQ ID NO: 49346 - DNA, 15 bp, Homo sapiens
acatacggatttcat

SEQ ID NO: 49347 - DNA, 15 bp, Homo sapiens
catacggatttcatt

SEQ ID NO: 49348 - DNA, 15 bp, Homo sapiens
atacggatttcattt

SEQ ID NO: 49349 - DNA, 15 bp, Homo sapiens
tacggatttcatttg

SEQ ID NO: 49350 - DNA, 15 bp, Homo sapiens
acggatttcatttgc

SEQ ID NO: 49351 - DNA, 15 bp, Homo sapiens
cggatttcatttgcc

SEQ ID NO: 49352 - DNA, 15 bp, Homo sapiens
ggatttcatttgcca

SEQ ID NO: 49353 - DNA, 15 bp, Homo sapiens
gatttcatttgccag

SEQ ID NO: 49354 - DNA, 15 bp, Homo sapiens
atttcatttgccagc

SEQ ID NO: 49355 - DNA, 15 bp, Homo sapiens
tttcatttgccagca

SEQ ID NO: 49356 - DNA, 15 bp, Homo sapiens
ttcatttgccagcat

SEQ ID NO: 49357 - DNA, 15 bp, Homo sapiens
tcatttgccagcatc

SEQ ID NO: 49358 - DNA, 15 bp, Homo sapiens
catttgccagcatca

SEQ ID NO: 49359 - DNA, 15 bp, Homo sapiens
atttgccagcatcat

SEQ ID NO: 49360 - DNA, 15 bp, Homo sapiens
tttgccagcatcatt

SEQ ID NO: 49361 - DNA, 15 bp, Homo sapiens
ttgccagcatcattt

SEQ ID NO: 49362 - DNA, 15 bp, Homo sapiens
tgccagcatcattta

SEQ ID NO: 49363 - DNA, 15 bp, Homo sapiens
gccagcatcatttat

SEQ ID NO: 49364 - DNA, 15 bp, Homo sapiens
ccagcatcatttatt

SEQ ID NO: 49365 - DNA, 15 bp, Homo sapiens
cagcatcatttattg

SEQ ID NO: 49366 - DNA, 15 bp, Homo sapiens
agcatcatttattgc

SEQ ID NO: 49367 - DNA, 15 bp, Homo sapiens
gcatcatttattgcc

SEQ ID NO: 49368 - DNA, 15 bp, Homo sapiens
catcatttattgcct

SEQ ID NO: 49369 - DNA, 15 bp, Homo sapiens
atcatttattgccta

SEQ ID NO: 49370 - DNA, 15 bp, Homo sapiens
tcatttattgcctaa

SEQ ID NO: 49371 - DNA, 15 bp, Homo sapiens
catttattgcctaac

SEQ ID NO: 49372 - DNA, 15 bp, Homo sapiens
atttattgcctaaca

SEQ ID NO: 49373 - DNA, 15 bp, Homo sapiens
tttattgcctaacat

SEQ ID NO: 49374 - DNA, 15 bp, Homo sapiens
ttattgcctaacatt

SEQ ID NO: 49375 - DNA, 15 bp, Homo sapiens
tattgcctaacatta

SEQ ID NO: 49376 - DNA, 15 bp, Homo sapiens
attgcctaacattac

SEQ ID NO: 49377 - DNA, 15 bp, Homo sapiens
ttgcctaacattact

SEQ ID NO: 49378 - DNA, 15 bp, Homo sapiens
tgcctaacattactc

SEQ ID NO: 49379 - DNA, 15 bp, Homo sapiens
gcctaacattactcc

SEQ ID NO: 49380 - DNA, 15 bp, Homo sapiens
cctaacattactcca

SEQ ID NO: 49381 - DNA, 15 bp, Homo sapiens
ctaacattactccat

SEQ ID NO: 49382 - DNA, 15 bp, Homo sapiens
taacattactccata

SEQ ID NO: 49383 - DNA, 15 bp, Homo sapiens
aacattactccatac

SEQ ID NO: 49384 - DNA, 15 bp, Homo sapiens
acattactccatact

SEQ ID NO: 49385 - DNA, 15 bp, Homo sapiens
cattactccatacta

SEQ ID NO: 49386 - DNA, 15 bp, Homo sapiens
attactccatactaa

SEQ ID NO: 49387 - DNA, 15 bp, Homo sapiens
ttactccatactaaa

SEQ ID NO: 49388 - DNA, 15 bp, Homo sapiens
tactccatactaaac

SEQ ID NO: 49389 - DNA, 15 bp, Homo sapiens
actccatactaaaca

SEQ ID NO: 49390 - DNA, 15 bp, Homo sapiens
ctccatactaaacag

SEQ ID NO: 49391 - DNA, 15 bp, Homo sapiens
tccatactaaacaga

SEQ ID NO: 49392 - DNA, 15 bp, Homo sapiens
ccatactaaacagag

SEQ ID NO: 49393 - DNA, 15 bp, Homo sapiens
catactaaacagagt

SEQ ID NO: 49394 - DNA, 15 bp, Homo sapiens
atactaaacagagta

SEQ ID NO: 49395 - DNA, 15 bp, Homo sapiens
tactaaacagagtaa

SEQ ID NO: 49396 - DNA, 15 bp, Homo sapiens
actaaacagagtaaa

SEQ ID NO: 49397 - DNA, 15 bp, Homo sapiens
ctaaacagagtaaat

SEQ ID NO: 49398 - DNA, 15 bp, Homo sapiens
taaacagagtaaatg

SEQ ID NO: 49399 - DNA, 15 bp, Homo sapiens
aaacagagtaaatgg

SEQ ID NO: 49400 - DNA, 15 bp, Homo sapiens
aacagagtaaatgga

SEQ ID NO: 49401 - DNA, 15 bp, Homo sapiens
acagagtaaatggat

SEQ ID NO: 49402 - DNA, 15 bp, Homo sapiens
cagagtaaatggatg

SEQ ID NO: 49403 - DNA, 15 bp, Homo sapiens
agagtaaatggatgc

SEQ ID NO: 49404 - DNA, 15 bp, Homo sapiens
gagtaaatggatgca

SEQ ID NO: 49405 - DNA, 15 bp, Homo sapiens
agtaaatggatgcag

SEQ ID NO: 49406 - DNA, 15 bp, Homo sapiens
gtaaatggatgcaga

SEQ ID NO: 49407 - DNA, 15 bp, Homo sapiens
taaatggatgcagag

SEQ ID NO: 49408 - DNA, 15 bp, Homo sapiens
aaatggatgcagagt

SEQ ID NO: 49409 - DNA, 15 bp, Homo sapiens
aatggatgcagagtg

SEQ ID NO: 49410 - DNA, 15 bp, Homo sapiens
atggatgcagagtgt

SEQ ID NO: 49411 - DNA, 15 bp, Homo sapiens
tggatgcagagtgta

SEQ ID NO: 49412 - DNA, 15 bp, Homo sapiens
ggatgcagagtgtaa

SEQ ID NO: 49413 - DNA, 15 bp, Homo sapiens
gatgcagagtgtaac

SEQ ID NO: 49414 - DNA, 15 bp, Homo sapiens
atgcagagtgtaacc

SEQ ID NO: 49415 - DNA, 15 bp, Homo sapiens
tgcagagtgtaacca

SEQ ID NO: 49416 - DNA, 15 bp, Homo sapiens
gcagagtgtaaccag

SEQ ID NO: 49417 - DNA, 15 bp, Homo sapiens
cagagtgtaaccagt

SEQ ID NO: 49418 - DNA, 15 bp, Homo sapiens
agagtgtaaccagta

SEQ ID NO: 49419 - DNA, 15 bp, Homo sapiens
gagtgtaaccagtaa

SEQ ID NO: 49420 - DNA, 15 bp, Homo sapiens
agtgtaaccagtaag

SEQ ID NO: 49421 - DNA, 15 bp, Homo sapiens
gtgtaaccagtaagt

SEQ ID NO: 49422 - DNA, 15 bp, Homo sapiens
tgtaaccagtaagtt

SEQ ID NO: 49423 - DNA, 15 bp, Homo sapiens
gtaaccagtaagttt

SEQ ID NO: 49424 - DNA, 15 bp, Homo sapiens
taaccagtaagtttg

SEQ ID NO: 49425 - DNA, 15 bp, Homo sapiens
aaccagtaagtttgc

SEQ ID NO: 49426 - DNA, 15 bp, Homo sapiens
accagtaagtttgct

SEQ ID NO: 49427 - DNA, 15 bp, Homo sapiens
ccagtaagtttgctc

SEQ ID NO: 49428 - DNA, 15 bp, Homo sapiens
cagtaagtttgctca

SEQ ID NO: 49429 - DNA, 15 bp, Homo sapiens
agtaagtttgctcat

SEQ ID NO: 49430 - DNA, 15 bp, Homo sapiens
gtaagtttgctcatt

SEQ ID NO: 49431 - DNA, 15 bp, Homo sapiens
taagtttgctcattc

SEQ ID NO: 49432 - DNA, 15 bp, Homo sapiens
aagtttgctcattca

SEQ ID NO: 49433 - DNA, 15 bp, Homo sapiens
gtttgctcattcact

SEQ ID NO: 49434 - DNA, 15 bp, Homo sapiens
tttgctcattcactt

SEQ ID NO: 49435 - DNA, 15 bp, Homo sapiens
ttgctcattcacttt

SEQ ID NO: 49436 - DNA, 15 bp, Homo sapiens
tgctcattcactttt

SEQ ID NO: 49437 - DNA, 15 bp, Homo sapiens
gctcattcacttttg

SEQ ID NO: 49438 - DNA, 15 bp, Homo sapiens
ctcattcacttttga

SEQ ID NO: 49439 - DNA, 15 bp, Homo sapiens
tcattcacttttgaa

SEQ ID NO: 49440 - DNA, 15 bp, Homo sapiens
cattcacttttgaag

SEQ ID NO: 49441 - DNA, 15 bp, Homo sapiens
attcacttttgaagc

SEQ ID NO: 49442 - DNA, 15 bp, Homo sapiens
ttcacttttgaagct

SEQ ID NO: 49443 - DNA, 15 bp, Homo sapiens
tcacttttgaagctc

SEQ ID NO: 49444 - DNA, 15 bp, Homo sapiens
cacttttgaagctca

SEQ ID NO: 49445 - DNA, 15 bp, Homo sapiens
acttttgaagctcat

SEQ ID NO: 49446 - DNA, 15 bp, Homo sapiens
cttttgaagctcatc

SEQ ID NO: 49447 - DNA, 15 bp, Homo sapiens
ttttgaagctcatct

SEQ ID NO: 49448 - DNA, 15 bp, Homo sapiens
tttgaagctcatctg

SEQ ID NO: 49449 - DNA, 15 bp, Homo sapiens
ttgaagctcatctgt

SEQ ID NO: 49450 - DNA, 15 bp, Homo sapiens
tgaagctcatctgtg

SEQ ID NO: 49451 - DNA, 15 bp, Homo sapiens
gaagctcatctgtgc

SEQ ID NO: 49452 - DNA, 15 bp, Homo sapiens
aagctcatctgtgca

SEQ ID NO: 49453 - DNA, 15 bp, Homo sapiens
agctcatctgtgcat

SEQ ID NO: 49454 - DNA, 15 bp, Homo sapiens
gctcatctgtgcatg

SEQ ID NO: 49455 - DNA, 15 bp, Homo sapiens
ctcatctgtgcatgt

SEQ ID NO: 49456 - DNA, 15 bp, Homo sapiens
tcatctgtgcatgtt

SEQ ID NO: 49457 - DNA, 15 bp, Homo sapiens
catctgtgcatgtta

SEQ ID NO: 49458 - DNA, 15 bp, Homo sapiens
atctgtgcatgttat

SEQ ID NO: 49459 - DNA, 15 bp, Homo sapiens
tctgtgcatgttatt

SEQ ID NO: 49460 - DNA, 15 bp, Homo sapiens
ctgtgcatgttattc

SEQ ID NO: 49461 - DNA, 15 bp, Homo sapiens
tgtgcatgttattca

SEQ ID NO: 49462 - DNA, 15 bp, Homo sapiens
gtgcatgttattcat

SEQ ID NO: 49463 - DNA, 15 bp, Homo sapiens
tgcatgttattcatc

SEQ ID NO: 49464 - DNA, 15 bp, Homo sapiens
gcatgttattcatcc

SEQ ID NO: 49465 - DNA, 15 bp, Homo sapiens
catgttattcatcct

SEQ ID NO: 49466 - DNA, 15 bp, Homo sapiens
atgttattcatccta

SEQ ID NO: 49467 - DNA, 15 bp, Homo sapiens
tgttattcatcctaa

SEQ ID NO: 49468 - DNA, 15 bp, Homo sapiens
gttattcatcctaat

SEQ ID NO: 49469 - DNA, 15 bp, Homo sapiens
ttattcatcctaata

SEQ ID NO: 49470 - DNA, 15 bp, Homo sapiens
tattcatcctaataa

SEQ ID NO: 49471 - DNA, 15 bp, Homo sapiens
attcatcctaataaa

SEQ ID NO: 49472 - DNA, 15 bp, Homo sapiens
ttcatcctaataaag

SEQ ID NO: 49473 - DNA, 15 bp, Homo sapiens
tcatcctaataaaga

SEQ ID NO: 49474 - DNA, 15 bp, Homo sapiens
catcctaataaagaa

SEQ ID NO: 49475 - DNA, 15 bp, Homo sapiens
atcctaataaagaaa

SEQ ID NO: 49476 - DNA, 15 bp, Homo sapiens
tcctaataaagaaaa

SEQ ID NO: 49477 - DNA, 15 bp, Homo sapiens
cctaataaagaaaat

SEQ ID NO: 49478 - DNA, 15 bp, Homo sapiens
ctaataaagaaaatt

SEQ ID NO: 49479 - DNA, 15 bp, Homo sapiens
taataaagaaaattt

SEQ ID NO: 49480 - DNA, 15 bp, Homo sapiens
aataaagaaaattta

SEQ ID NO: 49481 - DNA, 15 bp, Homo sapiens
ataaagaaaatttat

SEQ ID NO: 49482 - DNA, 15 bp, Homo sapiens
taaagaaaatttatc

SEQ ID NO: 49483 - DNA, 15 bp, Homo sapiens
aaagaaaatttatca

SEQ ID NO: 49484 - DNA, 15 bp, Homo sapiens
aagaaaatttatcac

SEQ ID NO: 49485 - DNA, 15 bp, Homo sapiens
agaaaatttatcaca

SEQ ID NO: 49486 - DNA, 15 bp, Homo sapiens
gaaaatttatcacaa

SEQ ID NO: 49487 - DNA, 15 bp, Homo sapiens
aaaatttatcacaac

SEQ ID NO: 49488 - DNA, 15 bp, Homo sapiens
aaatttatcacaaca

SEQ ID NO: 49489 - DNA, 15 bp, Homo sapiens
aatttatcacaacac

SEQ ID NO: 49490 - DNA, 15 bp, Homo sapiens
atttatcacaacaca

SEQ ID NO: 49491 - DNA, 15 bp, Homo sapiens
tttatcacaacacaa

SEQ ID NO: 49492 - DNA, 15 bp, Homo sapiens
ttatcacaacacaac

SEQ ID NO: 49493 - DNA, 15 bp, Homo sapiens
tatcacaacacaact

SEQ ID NO: 49494 - DNA, 15 bp, Homo sapiens
atcacaacacaactt

SEQ ID NO: 49495 - DNA, 15 bp, Homo sapiens
tcacaacacaacttg

SEQ ID NO: 49496 - DNA, 15 bp, Homo sapiens
cacaacacaacttga

SEQ ID NO: 49497 - DNA, 15 bp, Homo sapiens
acaacacaacttgat

SEQ ID NO: 49498 - DNA, 15 bp, Homo sapiens
caacacaacttgatg

SEQ ID NO: 49499 - DNA, 15 bp, Homo sapiens
aacacaacttgatgc

SEQ ID NO: 49500 - DNA, 15 bp, Homo sapiens
acacaacttgatgcg

SEQ ID NO: 49501 - DNA, 15 bp, Homo sapiens
cacaacttgatgcga

SEQ ID NO: 49502 - DNA, 15 bp, Homo sapiens
acaacttgatgcgat

SEQ ID NO: 49503 - DNA, 15 bp, Homo sapiens
caacttgatgcgatt

SEQ ID NO: 49504 - DNA, 15 bp, Homo sapiens
aacttgatgcgattc

SEQ ID NO: 49505 - DNA, 15 bp, Homo sapiens
acttgatgcgattct

SEQ ID NO: 49506 - DNA, 15 bp, Homo sapiens
cttgatgcgattctt

SEQ ID NO: 49507 - DNA, 15 bp, Homo sapiens
ttgatgcgattcttg

SEQ ID NO: 49508 - DNA, 15 bp, Homo sapiens
tgatgcgattcttgt

SEQ ID NO: 49509 - DNA, 15 bp, Homo sapiens
gatgcgattcttgtt

SEQ ID NO: 49510 - DNA, 15 bp, Homo sapiens
atgcgattcttgttc

SEQ ID NO: 49511 - DNA, 15 bp, Homo sapiens
tgcgattcttgttca

SEQ ID NO: 49512 - DNA, 15 bp, Homo sapiens
gcgattcttgttcaa

SEQ ID NO: 49513 - DNA, 15 bp, Homo sapiens
cgattcttgttcaaa

SEQ ID NO: 49514 - DNA, 15 bp, Homo sapiens
gattcttgttcaaat

SEQ ID NO: 49515 - DNA, 15 bp, Homo sapiens
attcttgttcaaatg

SEQ ID NO: 49516 - DNA, 15 bp, Homo sapiens
ttcttgttcaaatga

SEQ ID NO: 49517 - DNA, 15 bp, Homo sapiens
tcttgttcaaatgat

SEQ ID NO: 49518 - DNA, 15 bp, Homo sapiens
cttgttcaaatgatt

SEQ ID NO: 49519 - DNA, 15 bp, Homo sapiens
ttgttcaaatgattt

SEQ ID NO: 49520 - DNA, 15 bp, Homo sapiens
tgttcaaatgatttc

SEQ ID NO: 49521 - DNA, 15 bp, Homo sapiens
gttcaaatgatttcc

SEQ ID NO: 49522 - DNA, 15 bp, Homo sapiens
ttcaaatgatttcct

SEQ ID NO: 49523 - DNA, 15 bp, Homo sapiens
tcaaatgatttcctc

SEQ ID NO: 49524 - DNA, 15 bp, Homo sapiens
caaatgatttcctct

SEQ ID NO: 49525 - DNA, 15 bp, Homo sapiens
aaatgatttcctctt

SEQ ID NO: 49526 - DNA, 15 bp, Homo sapiens
aatgatttcctcttc

SEQ ID NO: 49527 - DNA, 15 bp, Homo sapiens
atgatttcctcttcc

SEQ ID NO: 49528 - DNA, 15 bp, Homo sapiens
tgatttcctcttcca

SEQ ID NO: 49529 - DNA, 15 bp, Homo sapiens
gatttcctcttccat

SEQ ID NO: 49530 - DNA, 15 bp, Homo sapiens
atttcctcttccatt

SEQ ID NO: 49531 - DNA, 15 bp, Homo sapiens
tttcctcttccattg

SEQ ID NO: 49532 - DNA, 15 bp, Homo sapiens
ttcctcttccattga

SEQ ID NO: 49533 - DNA, 15 bp, Homo sapiens
tcctcttccattgaa

SEQ ID NO: 49534 - DNA, 15 bp, Homo sapiens
cctcttccattgaac

SEQ ID NO: 49535 - DNA, 15 bp, Homo sapiens
ctcttccattgaaca

SEQ ID NO: 49536 - DNA, 15 bp, Homo sapiens
tcttccattgaacaa

SEQ ID NO: 49537 - DNA, 15 bp, Homo sapiens
cttccattgaacaac

SEQ ID NO: 49538 - DNA, 15 bp, Homo sapiens
ttccattgaacaaca

SEQ ID NO: 49539 - DNA, 15 bp, Homo sapiens
tccattgaacaacag

SEQ ID NO: 49540 - DNA, 15 bp, Homo sapiens
ccattgaacaacagc

SEQ ID NO: 49541 - DNA, 15 bp, Homo sapiens
cattgaacaacagcc

SEQ ID NO: 49542 - DNA, 15 bp, Homo sapiens
attgaacaacagcca

SEQ ID NO: 49543 - DNA, 15 bp, Homo sapiens
ttgaacaacagccag

SEQ ID NO: 49544 - DNA, 15 bp, Homo sapiens
tgaacaacagccagc

SEQ ID NO: 49545 - DNA, 15 bp, Homo sapiens
gaacaacagccagca

SEQ ID NO: 49546 - DNA, 15 bp, Homo sapiens
aacaacagccagcac

SEQ ID NO: 49547 - DNA, 15 bp, Homo sapiens
acaacagccagcact

SEQ ID NO: 49548 - DNA, 15 bp, Homo sapiens
caacagccagcactt

SEQ ID NO: 49549 - DNA, 15 bp, Homo sapiens
aacagccagcactta

SEQ ID NO: 49550 - DNA, 15 bp, Homo sapiens
acagccagcacttaa

SEQ ID NO: 49551 - DNA, 15 bp, Homo sapiens
cagccagcacttaaa

SEQ ID NO: 49552 - DNA, 15 bp, Homo sapiens
agccagcacttaaaa

SEQ ID NO: 49553 - DNA, 15 bp, Homo sapiens
gccagcacttaaaac

SEQ ID NO: 49554 - DNA, 15 bp, Homo sapiens
ccagcacttaaaacc

SEQ ID NO: 49555 - DNA, 15 bp, Homo sapiens
cagcacttaaaacct

SEQ ID NO: 49556 - DNA, 15 bp, Homo sapiens
agcacttaaaaccta

SEQ ID NO: 49557 - DNA, 15 bp, Homo sapiens
gcacttaaaacctag

SEQ ID NO: 49558 - DNA, 15 bp, Homo sapiens
cacttaaaacctaga

SEQ ID NO: 49559 - DNA, 15 bp, Homo sapiens
acttaaaacctagaa

SEQ ID NO: 49560 - DNA, 15 bp, Homo sapiens
cttaaaacctagaat

SEQ ID NO: 49561 - DNA, 15 bp, Homo sapiens
ttaaaacctagaatt

SEQ ID NO: 49562 - DNA, 15 bp, Homo sapiens
taaaacctagaattc

SEQ ID NO: 49563 - DNA, 15 bp, Homo sapiens
aaaacctagaattcc

SEQ ID NO: 49564 - DNA, 15 bp, Homo sapiens
aaacctagaattcca

SEQ ID NO: 49565 - DNA, 15 bp, Homo sapiens
aacctagaattccac

SEQ ID NO: 49566 - DNA, 15 bp, Homo sapiens
acctagaattccaca

SEQ ID NO: 49567 - DNA, 15 bp, Homo sapiens
cctagaattccacag

SEQ ID NO: 49568 - DNA, 15 bp, Homo sapiens
ctagaattccacaga

SEQ ID NO: 49569 - DNA, 15 bp, Homo sapiens
tagaattccacagaa

SEQ ID NO: 49570 - DNA, 15 bp, Homo sapiens
agaattccacagaat

SEQ ID NO: 49571 - DNA, 15 bp, Homo sapiens
gaattccacagaatt

SEQ ID NO: 49572 - DNA, 15 bp, Homo sapiens
aattccacagaattc

SEQ ID NO: 49573 - DNA, 15 bp, Homo sapiens
attccacagaattct

SEQ ID NO: 49574 - DNA, 15 bp, Homo sapiens
ttccacagaattctc

SEQ ID NO: 49575 - DNA, 15 bp, Homo sapiens
tccacagaattctct

SEQ ID NO: 49576 - DNA, 15 bp, Homo sapiens
ccacagaattctctc

SEQ ID NO: 49577 - DNA, 15 bp, Homo sapiens
cacagaattctctcc

SEQ ID NO: 49578 - DNA, 15 bp, Homo sapiens
acagaattctctcct

SEQ ID NO: 49579 - DNA, 15 bp, Homo sapiens
cagaattctctcctc

SEQ ID NO: 49580 - DNA, 15 bp, Homo sapiens
agaattctctcctcg

SEQ ID NO: 49581 - DNA, 15 bp, Homo sapiens
gaattctctcctcga

SEQ ID NO: 49582 - DNA, 15 bp, Homo sapiens
aattctctcctcgat

SEQ ID NO: 49583 - DNA, 15 bp, Homo sapiens
attctctcctcgatt

SEQ ID NO: 49584 - DNA, 15 bp, Homo sapiens
ttctctcctcgattc

SEQ ID NO: 49585 - DNA, 15 bp, Homo sapiens
tctctcctcgattcc

SEQ ID NO: 49586 - DNA, 15 bp, Homo sapiens
ctctcctcgattcct

SEQ ID NO: 49587 - DNA, 15 bp, Homo sapiens
tctcctcgattcctc

SEQ ID NO: 49588 - DNA, 15 bp, Homo sapiens
ctcctcgattcctct

SEQ ID NO: 49589 - DNA, 15 bp, Homo sapiens
tcctcgattcctctt

SEQ ID NO: 49590 - DNA, 15 bp, Homo sapiens
cctcgattcctcttt

SEQ ID NO: 49591 - DNA, 15 bp, Homo sapiens
ctcgattcctcttta

SEQ ID NO: 49592 - DNA, 15 bp, Homo sapiens
tcgattcctctttaa

SEQ ID NO: 49593 - DNA, 15 bp, Homo sapiens
cgattcctctttaaa

SEQ ID NO: 49594 - DNA, 15 bp, Homo sapiens
gattcctctttaaaa

SEQ ID NO: 49595 - DNA, 15 bp, Homo sapiens
attcctctttaaaat

SEQ ID NO: 49596 - DNA, 15 bp, Homo sapiens
ttcctctttaaaatg

SEQ ID NO: 49597 - DNA, 15 bp, Homo sapiens
tcctctttaaaatgc

SEQ ID NO: 49598 - DNA, 15 bp, Homo sapiens
cctctttaaaatgca

SEQ ID NO: 49599 - DNA, 15 bp, Homo sapiens
ctctttaaaatgcaa

SEQ ID NO: 49600 - DNA, 15 bp, Homo sapiens
tctttaaaatgcaat

SEQ ID NO: 49601 - DNA, 15 bp, Homo sapiens
ctttaaaatgcaatt

SEQ ID NO: 49602 - DNA, 15 bp, Homo sapiens
tttaaaatgcaattc

SEQ ID NO: 49603 - DNA, 15 bp, Homo sapiens
ttaaaatgcaattca

SEQ ID NO: 49604 - DNA, 15 bp, Homo sapiens
taaaatgcaattcac

SEQ ID NO: 49605 - DNA, 15 bp, Homo sapiens
aaaatgcaattcaca

SEQ ID NO: 49606 - DNA, 15 bp, Homo sapiens
aaatgcaattcacag

SEQ ID NO: 49607 - DNA, 15 bp, Homo sapiens
aatgcaattcacagt

SEQ ID NO: 49608 - DNA, 15 bp, Homo sapiens
atgcaattcacagtt

SEQ ID NO: 49609 - DNA, 15 bp, Homo sapiens
tgcaattcacagttt

SEQ ID NO: 49610 - DNA, 15 bp, Homo sapiens
gcaattcacagtttg

SEQ ID NO: 49611 - DNA, 15 bp, Homo sapiens
caattcacagtttga

SEQ ID NO: 49612 - DNA, 15 bp, Homo sapiens
aattcacagtttgag

SEQ ID NO: 49613 - DNA, 15 bp, Homo sapiens
attcacagtttgaga

SEQ ID NO: 49614 - DNA, 15 bp, Homo sapiens
ttcacagtttgagat

SEQ ID NO: 49615 - DNA, 15 bp, Homo sapiens
tcacagtttgagatc

SEQ ID NO: 49616 - DNA, 15 bp, Homo sapiens
cacagtttgagatca

SEQ ID NO: 49617 - DNA, 15 bp, Homo sapiens
acagtttgagatcac

SEQ ID NO: 49618 - DNA, 15 bp, Homo sapiens
cagtttgagatcaca

SEQ ID NO: 49619 - DNA, 15 bp, Homo sapiens
agtttgagatcacag

SEQ ID NO: 49620 - DNA, 15 bp, Homo sapiens
gtttgagatcacaga

SEQ ID NO: 49621 - DNA, 15 bp, Homo sapiens
tttgagatcacagag

SEQ ID NO: 49622 - DNA, 15 bp, Homo sapiens
ttgagatcacagagc

SEQ ID NO: 49623 - DNA, 15 bp, Homo sapiens
tgagatcacagagcc

SEQ ID NO: 49624 - DNA, 15 bp, Homo sapiens
gagatcacagagcct

SEQ ID NO: 49625 - DNA, 15 bp, Homo sapiens
agatcacagagcctg

SEQ ID NO: 49626 - DNA, 15 bp, Homo sapiens
gatcacagagcctgc

SEQ ID NO: 49627 - DNA, 15 bp, Homo sapiens
atcacagagcctgcc

SEQ ID NO: 49628 - DNA, 15 bp, Homo sapiens
tcacagagcctgcca

SEQ ID NO: 49629 - DNA, 15 bp, Homo sapiens
cacagagcctgccag

SEQ ID NO: 49630 - DNA, 15 bp, Homo sapiens
acagagcctgccagt

SEQ ID NO: 49631 - DNA, 15 bp, Homo sapiens
cagagcctgccagtg

SEQ ID NO: 49632 - DNA, 15 bp, Homo sapiens
agagcctgccagtgg

SEQ ID NO: 49633 - DNA, 15 bp, Homo sapiens
gagcctgccagtggc

SEQ ID NO: 49634 - DNA, 15 bp, Homo sapiens
agcctgccagtggct

SEQ ID NO: 49635 - DNA, 15 bp, Homo sapiens
gcctgccagtggctg

SEQ ID NO: 49636 - DNA, 15 bp, Homo sapiens
cctgccagtggctga

SEQ ID NO: 49637 - DNA, 15 bp, Homo sapiens
ctgccagtggctgaa

SEQ ID NO: 49638 - DNA, 15 bp, Homo sapiens
tgccagtggctgaat

SEQ ID NO: 49639 - DNA, 15 bp, Homo sapiens
gccagtggctgaatg

SEQ ID NO: 49640 - DNA, 15 bp, Homo sapiens
ccagtggctgaatgg

SEQ ID NO: 49641 - DNA, 15 bp, Homo sapiens
cagtggctgaatggc

SEQ ID NO: 49642 - DNA, 15 bp, Homo sapiens
agtggctgaatggct

SEQ ID NO: 49643 - DNA, 15 bp, Homo sapiens
gtggctgaatggctg

SEQ ID NO: 49644 - DNA, 15 bp, Homo sapiens
tggctgaatggctgc

SEQ ID NO: 49645 - DNA, 15 bp, Homo sapiens
ggctgaatggctgca

SEQ ID NO: 49646 - DNA, 15 bp, Homo sapiens
gctgaatggctgcac

SEQ ID NO: 49647 - DNA, 15 bp, Homo sapiens
ctgaatggctgcact

SEQ ID NO: 49648 - DNA, 15 bp, Homo sapiens
tgaatggctgcacta

SEQ ID NO: 49649 - DNA, 15 bp, Homo sapiens
gaatggctgcactag

SEQ ID NO: 49650 - DNA, 15 bp, Homo sapiens
aatggctgcactaga

SEQ ID NO: 49651 - DNA, 15 bp, Homo sapiens
atggctgcactagat

SEQ ID NO: 49652 - DNA, 15 bp, Homo sapiens
tggctgcactagatg

SEQ ID NO: 49653 - DNA, 15 bp, Homo sapiens
ggctgcactagatgg

SEQ ID NO: 49654 - DNA, 15 bp, Homo sapiens
gctgcactagatggc

SEQ ID NO: 49655 - DNA, 15 bp, Homo sapiens
ctgcactagatggct

SEQ ID NO: 49656 - DNA, 15 bp, Homo sapiens
tgcactagatggctg

SEQ ID NO: 49657 - DNA, 15 bp, Homo sapiens
gcactagatggctga

SEQ ID NO: 49658 - DNA, 15 bp, Homo sapiens
cactagatggctgag

SEQ ID NO: 49659 - DNA, 15 bp, Homo sapiens
actagatggctgaga

SEQ ID NO: 49660 - DNA, 15 bp, Homo sapiens
ctagatggctgagag

SEQ ID NO: 49661 - DNA, 15 bp, Homo sapiens
tagatggctgagagt

SEQ ID NO: 49662 - DNA, 15 bp, Homo sapiens
agatggctgagagtc

SEQ ID NO: 49663 - DNA, 15 bp, Homo sapiens
gatggctgagagtcc

SEQ ID NO: 49664 - DNA, 15 bp, Homo sapiens
atggctgagagtcct

SEQ ID NO: 49665 - DNA, 15 bp, Homo sapiens
tggctgagagtcctt

SEQ ID NO: 49666 - DNA, 15 bp, Homo sapiens
ggctgagagtccttc

SEQ ID NO: 49667 - DNA, 15 bp, Homo sapiens
gctgagagtccttca

SEQ ID NO: 49668 - DNA, 15 bp, Homo sapiens
ctgagagtccttcaa

SEQ ID NO: 49669 - DNA, 15 bp, Homo sapiens
tgagagtccttcaat

SEQ ID NO: 49670 - DNA, 15 bp, Homo sapiens
gagagtccttcaatt

SEQ ID NO: 49671 - DNA, 15 bp, Homo sapiens
agagtccttcaatta

SEQ ID NO: 49672 - DNA, 15 bp, Homo sapiens
gagtccttcaattaa

SEQ ID NO: 49673 - DNA, 15 bp, Homo sapiens
agtccttcaattaag

SEQ ID NO: 49674 - DNA, 15 bp, Homo sapiens
gtccttcaattaagc

SEQ ID NO: 49675 - DNA, 15 bp, Homo sapiens
tccttcaattaagca

SEQ ID NO: 49676 - DNA, 15 bp, Homo sapiens
ccttcaattaagcaa

SEQ ID NO: 49677 - DNA, 15 bp, Homo sapiens
cttcaattaagcaac

SEQ ID NO: 49678 - DNA, 15 bp, Homo sapiens
ttcaattaagcaaca

SEQ ID NO: 49679 - DNA, 15 bp, Homo sapiens
tcaattaagcaacaa

SEQ ID NO: 49680 - DNA, 15 bp, Homo sapiens
caattaagcaacaat

SEQ ID NO: 49681 - DNA, 15 bp, Homo sapiens
aattaagcaacaatt

SEQ ID NO: 49682 - DNA, 15 bp, Homo sapiens
attaagcaacaattt

SEQ ID NO: 49683 - DNA, 15 bp, Homo sapiens
ttaagcaacaatttt

SEQ ID NO: 49684 - DNA, 15 bp, Homo sapiens
taagcaacaattttg

SEQ ID NO: 49685 - DNA, 15 bp, Homo sapiens
aagcaacaattttgc

SEQ ID NO: 49686 - DNA, 15 bp, Homo sapiens
agcaacaattttgca

SEQ ID NO: 49687 - DNA, 15 bp, Homo sapiens
gcaacaattttgcaa

SEQ ID NO: 49688 - DNA, 15 bp, Homo sapiens
caacaattttgcaat

SEQ ID NO: 49689 - DNA, 15 bp, Homo sapiens
aacaattttgcaatt

SEQ ID NO: 49690 - DNA, 15 bp, Homo sapiens
acaattttgcaatta

SEQ ID NO: 49691 - DNA, 15 bp, Homo sapiens
caattttgcaattag

SEQ ID NO: 49692 - DNA, 15 bp, Homo sapiens
aattttgcaattagt

SEQ ID NO: 49693 - DNA, 15 bp, Homo sapiens
attttgcaattagtg

SEQ ID NO: 49694 - DNA, 15 bp, Homo sapiens
ttttgcaattagtgg

SEQ ID NO: 49695 - DNA, 15 bp, Homo sapiens
tttgcaattagtgga

SEQ ID NO: 49696 - DNA, 15 bp, Homo sapiens
ttgcaattagtggaa

SEQ ID NO: 49697 - DNA, 15 bp, Homo sapiens
tgcaattagtggaaa

SEQ ID NO: 49698 - DNA, 15 bp, Homo sapiens
gcaattagtggaaac

SEQ ID NO: 49699 - DNA, 15 bp, Homo sapiens
caattagtggaaact

SEQ ID NO: 49700 - DNA, 15 bp, Homo sapiens
aattagtggaaactg

SEQ ID NO: 49701 - DNA, 15 bp, Homo sapiens
attagtggaaactga

SEQ ID NO: 49702 - DNA, 15 bp, Homo sapiens
ttagtggaaactgag

SEQ ID NO: 49703 - DNA, 15 bp, Homo sapiens
tagtggaaactgagt

SEQ ID NO: 49704 - DNA, 15 bp, Homo sapiens
agtggaaactgagtg

SEQ ID NO: 49705 - DNA, 15 bp, Homo sapiens
gtggaaactgagtgc

SEQ ID NO: 49706 - DNA, 15 bp, Homo sapiens
tggaaactgagtgct

SEQ ID NO: 49707 - DNA, 15 bp, Homo sapiens
ggaaactgagtgctc

SEQ ID NO: 49708 - DNA, 15 bp, Homo sapiens
gaaactgagtgctct

SEQ ID NO: 49709 - DNA, 15 bp, Homo sapiens
aaactgagtgctcta

SEQ ID NO: 49710 - DNA, 15 bp, Homo sapiens
aactgagtgctctat

SEQ ID NO: 49711 - DNA, 15 bp, Homo sapiens
actgagtgctctata

SEQ ID NO: 49712 - DNA, 15 bp, Homo sapiens
ctgagtgctctataa

SEQ ID NO: 49713 - DNA, 15 bp, Homo sapiens
tgagtgctctataac

SEQ ID NO: 49714 - DNA, 15 bp, Homo sapiens
gagtgctctataaca

SEQ ID NO: 49715 - DNA, 15 bp, Homo sapiens
agtgctctataacaa

SEQ ID NO: 49716 - DNA, 15 bp, Homo sapiens
gtgctctataacaat

SEQ ID NO: 49717 - DNA, 15 bp, Homo sapiens
tgctctataacaatt

SEQ ID NO: 49718 - DNA, 15 bp, Homo sapiens
gctctataacaattg

SEQ ID NO: 49719 - DNA, 15 bp, Homo sapiens
ctctataacaattgt

SEQ ID NO: 49720 - DNA, 15 bp, Homo sapiens
tctataacaattgtt

SEQ ID NO: 49721 - DNA, 15 bp, Homo sapiens
ctataacaattgttt

SEQ ID NO: 49722 - DNA, 15 bp, Homo sapiens
tataacaattgtttg

SEQ ID NO: 49723 - DNA, 15 bp, Homo sapiens
ataacaattgtttga

SEQ ID NO: 49724 - DNA, 15 bp, Homo sapiens
taacaattgtttgaa

SEQ ID NO: 49725 - DNA, 15 bp, Homo sapiens
aacaattgtttgaaa

SEQ ID NO: 49726 - DNA, 15 bp, Homo sapiens
acaattgtttgaaaa

SEQ ID NO: 49727 - DNA, 15 bp, Homo sapiens
caattgtttgaaaac

SEQ ID NO: 49728 - DNA, 15 bp, Homo sapiens
aattgtttgaaaaca

SEQ ID NO: 49729 - DNA, 15 bp, Homo sapiens
attgtttgaaaacaa

SEQ ID NO: 49730 - DNA, 15 bp, Homo sapiens
ttgtttgaaaacaag

SEQ ID NO: 49731 - DNA, 15 bp, Homo sapiens
tgtttgaaaacaagt

SEQ ID NO: 49732 - DNA, 15 bp, Homo sapiens
gtttgaaaacaagtt

SEQ ID NO: 49733 - DNA, 15 bp, Homo sapiens
tttgaaaacaagttg

SEQ ID NO: 49734 - DNA, 15 bp, Homo sapiens
ttgaaaacaagttga

SEQ ID NO: 49735 - DNA, 15 bp, Homo sapiens
tgaaaacaagttgag

SEQ ID NO: 49736 - DNA, 15 bp, Homo sapiens
gaaaacaagttgaga

SEQ ID NO: 49737 - DNA, 15 bp, Homo sapiens
aaaacaagttgagac

SEQ ID NO: 49738 - DNA, 15 bp, Homo sapiens
aaacaagttgagaca

SEQ ID NO: 49739 - DNA, 15 bp, Homo sapiens
aacaagttgagacaa

SEQ ID NO: 49740 - DNA, 15 bp, Homo sapiens
acaagttgagacaag

SEQ ID NO: 49741 - DNA, 15 bp, Homo sapiens
caagttgagacaagt

SEQ ID NO: 49742 - DNA, 15 bp, Homo sapiens
aagttgagacaagtt

SEQ ID NO: 49743 - DNA, 15 bp, Homo sapiens
agttgagacaagtta

SEQ ID NO: 49744 - DNA, 15 bp, Homo sapiens
gttgagacaagttag

SEQ ID NO: 49745 - DNA, 15 bp, Homo sapiens
ttgagacaagttagc

SEQ ID NO: 49746 - DNA, 15 bp, Homo sapiens
tgagacaagttagca

SEQ ID NO: 49747 - DNA, 15 bp, Homo sapiens
gagacaagttagcaa

SEQ ID NO: 49748 - DNA, 15 bp, Homo sapiens
agacaagttagcaat

SEQ ID NO: 49749 - DNA, 15 bp, Homo sapiens
gacaagttagcaatt

SEQ ID NO: 49750 - DNA, 15 bp, Homo sapiens
acaagttagcaatta

SEQ ID NO: 49751 - DNA, 15 bp, Homo sapiens
caagttagcaattac

SEQ ID NO: 49752 - DNA, 15 bp, Homo sapiens
aagttagcaattacc

SEQ ID NO: 49753 - DNA, 15 bp, Homo sapiens
agttagcaattaccc

SEQ ID NO: 49754 - DNA, 15 bp, Homo sapiens
gttagcaattaccct

SEQ ID NO: 49755 - DNA, 15 bp, Homo sapiens
ttagcaattacccta

SEQ ID NO: 49756 - DNA, 15 bp, Homo sapiens
tagcaattaccctat

SEQ ID NO: 49757 - DNA, 15 bp, Homo sapiens
agcaattaccctata

SEQ ID NO: 49758 - DNA, 15 bp, Homo sapiens
gcaattaccctataa

SEQ ID NO: 49759 - DNA, 15 bp, Homo sapiens
caattaccctataaa

SEQ ID NO: 49760 - DNA, 15 bp, Homo sapiens
aattaccctataaaa

SEQ ID NO: 49761 - DNA, 15 bp, Homo sapiens
attaccctataaaag

SEQ ID NO: 49762 - DNA, 15 bp, Homo sapiens
ttaccctataaaagg

SEQ ID NO: 49763 - DNA, 15 bp, Homo sapiens
taccctataaaaggg

SEQ ID NO: 49764 - DNA, 15 bp, Homo sapiens
accctataaaaggga

SEQ ID NO: 49765 - DNA, 15 bp, Homo sapiens
ccctataaaagggac

SEQ ID NO: 49766 - DNA, 15 bp, Homo sapiens
cctataaaagggaca

SEQ ID NO: 49767 - DNA, 15 bp, Homo sapiens
ctataaaagggacat

SEQ ID NO: 49768 - DNA, 15 bp, Homo sapiens
tataaaagggacata

SEQ ID NO: 49769 - DNA, 15 bp, Homo sapiens
ataaaagggacatat

SEQ ID NO: 49770 - DNA, 15 bp, Homo sapiens
taaaagggacatatt

SEQ ID NO: 49771 - DNA, 15 bp, Homo sapiens
aaaagggacatattc

SEQ ID NO: 49772 - DNA, 15 bp, Homo sapiens
aaagggacatattca

SEQ ID NO: 49773 - DNA, 15 bp, Homo sapiens
aagggacatattcac

SEQ ID NO: 49774 - DNA, 15 bp, Homo sapiens
agggacatattcact

SEQ ID NO: 49775 - DNA, 15 bp, Homo sapiens
gggacatattcactt

SEQ ID NO: 49776 - DNA, 15 bp, Homo sapiens
ggacatattcacttt

SEQ ID NO: 49777 - DNA, 15 bp, Homo sapiens
gacatattcactttt

SEQ ID NO: 49778 - DNA, 15 bp, Homo sapiens
acatattcacttttg

SEQ ID NO: 49779 - DNA, 15 bp, Homo sapiens
catattcacttttgt

SEQ ID NO: 49780 - DNA, 15 bp, Homo sapiens
atattcacttttgtt

SEQ ID NO: 49781 - DNA, 15 bp, Homo sapiens
tattcacttttgttg

SEQ ID NO: 49782 - DNA, 15 bp, Homo sapiens
attcacttttgttgg

SEQ ID NO: 49783 - DNA, 15 bp, Homo sapiens
ttcacttttgttgga

SEQ ID NO: 49784 - DNA, 15 bp, Homo sapiens
tcacttttgttggat

SEQ ID NO: 49785 - DNA, 15 bp, Homo sapiens
cacttttgttggata

SEQ ID NO: 49786 - DNA, 15 bp, Homo sapiens
acttttgttggatag

SEQ ID NO: 49787 - DNA, 15 bp, Homo sapiens
cttttgttggatagg

SEQ ID NO: 49788 - DNA, 15 bp, Homo sapiens
ttttgttggataggc

SEQ ID NO: 49789 - DNA, 15 bp, Homo sapiens
tttgttggataggcg

SEQ ID NO: 49790 - DNA, 15 bp, Homo sapiens
ttgttggataggcga

SEQ ID NO: 49791 - DNA, 15 bp, Homo sapiens
tgttggataggcgag

SEQ ID NO: 49792 - DNA, 15 bp, Homo sapiens
gttggataggcgaga

SEQ ID NO: 49793 - DNA, 15 bp, Homo sapiens
ttggataggcgagac

SEQ ID NO: 49794 - DNA, 15 bp, Homo sapiens
tggataggcgagacc

SEQ ID NO: 49795 - DNA, 15 bp, Homo sapiens
ggataggcgagaccc

SEQ ID NO: 49796 - DNA, 15 bp, Homo sapiens
gataggcgagacccc

SEQ ID NO: 49797 - DNA, 15 bp, Homo sapiens
ataggcgagacccct

SEQ ID NO: 49798 - DNA, 15 bp, Homo sapiens
taggcgagacccctc

SEQ ID NO: 49799 - DNA, 15 bp, Homo sapiens
aggcgagacccctca

SEQ ID NO: 49800 - DNA, 15 bp, Homo sapiens
ggcgagacccctcac

SEQ ID NO: 49801 - DNA, 15 bp, Homo sapiens
gcgagacccctcaca

SEQ ID NO: 49802 - DNA, 15 bp, Homo sapiens
cgagacccctcacac

SEQ ID NO: 49803 - DNA, 15 bp, Homo sapiens
gagacccctcacaca

SEQ ID NO: 49804 - DNA, 15 bp, Homo sapiens
agacccctcacacaa

SEQ ID NO: 49805 - DNA, 15 bp, Homo sapiens
gacccctcacacaaa

SEQ ID NO: 49806 - DNA, 15 bp, Homo sapiens
acccctcacacaaat

SEQ ID NO: 49807 - DNA, 15 bp, Homo sapiens
cccctcacacaaatt

SEQ ID NO: 49808 - DNA, 15 bp, Homo sapiens
ccctcacacaaattg

SEQ ID NO: 49809 - DNA, 15 bp, Homo sapiens
cctcacacaaattga

SEQ ID NO: 49810 - DNA, 15 bp, Homo sapiens
ctcacacaaattgaa

SEQ ID NO: 49811 - DNA, 15 bp, Homo sapiens
tcacacaaattgaac

SEQ ID NO: 49812 - DNA, 15 bp, Homo sapiens
cacacaaattgaact

SEQ ID NO: 49813 - DNA, 15 bp, Homo sapiens
acacaaattgaactc

SEQ ID NO: 49814 - DNA, 15 bp, Homo sapiens
cacaaattgaactct

SEQ ID NO: 49815 - DNA, 15 bp, Homo sapiens
acaaattgaactctt

SEQ ID NO: 49816 - DNA, 15 bp, Homo sapiens
caaattgaactcttc

SEQ ID NO: 49817 - DNA, 15 bp, Homo sapiens
aaattgaactcttcc

SEQ ID NO: 49818 - DNA, 15 bp, Homo sapiens
aattgaactcttcca

SEQ ID NO: 49819 - DNA, 15 bp, Homo sapiens
attgaactcttccac

SEQ ID NO: 49820 - DNA, 15 bp, Homo sapiens
ttgaactcttccaca

SEQ ID NO: 49821 - DNA, 15 bp, Homo sapiens
tgaactcttccacac

SEQ ID NO: 49822 - DNA, 15 bp, Homo sapiens
gaactcttccacaca

SEQ ID NO: 49823 - DNA, 15 bp, Homo sapiens
aactcttccacacag

SEQ ID NO: 49824 - DNA, 15 bp, Homo sapiens
actcttccacacagg

SEQ ID NO: 49825 - DNA, 15 bp, Homo sapiens
ctcttccacacaggg

SEQ ID NO: 49826 - DNA, 15 bp, Homo sapiens
tcttccacacaggga

SEQ ID NO: 49827 - DNA, 15 bp, Homo sapiens
cttccacacagggag

SEQ ID NO: 49828 - DNA, 15 bp, Homo sapiens
ttccacacagggaga

SEQ ID NO: 49829 - DNA, 15 bp, Homo sapiens
tccacacagggagat

SEQ ID NO: 49830 - DNA, 15 bp, Homo sapiens
ccacacagggagatg

SEQ ID NO: 49831 - DNA, 15 bp, Homo sapiens
cacacagggagatgc

SEQ ID NO: 49832 - DNA, 15 bp, Homo sapiens
acacagggagatgca

SEQ ID NO: 49833 - DNA, 15 bp, Homo sapiens
cacagggagatgcaa

SEQ ID NO: 49834 - DNA, 15 bp, Homo sapiens
acagggagatgcaag

SEQ ID NO: 49835 - DNA, 15 bp, Homo sapiens
cagggagatgcaagt

SEQ ID NO: 49836 - DNA, 15 bp, Homo sapiens
agggagatgcaagtt

SEQ ID NO: 49837 - DNA, 15 bp, Homo sapiens
gggagatgcaagttg

SEQ ID NO: 49838 - DNA, 15 bp, Homo sapiens
ggagatgcaagttga

SEQ ID NO: 49839 - DNA, 15 bp, Homo sapiens
gagatgcaagttgaa

SEQ ID NO: 49840 - DNA, 15 bp, Homo sapiens
agatgcaagttgaaa

SEQ ID NO: 49841 - DNA, 15 bp, Homo sapiens
gatgcaagttgaaaa

SEQ ID NO: 49842 - DNA, 15 bp, Homo sapiens
atgcaagttgaaaat

SEQ ID NO: 49843 - DNA, 15 bp, Homo sapiens
tgcaagttgaaaatt

SEQ ID NO: 49844 - DNA, 15 bp, Homo sapiens
gcaagttgaaaatta

SEQ ID NO: 49845 - DNA, 15 bp, Homo sapiens
caagttgaaaattaa

SEQ ID NO: 49846 - DNA, 15 bp, Homo sapiens
aagttgaaaattaat

SEQ ID NO: 49847 - DNA, 15 bp, Homo sapiens
agttgaaaattaatg

SEQ ID NO: 49848 - DNA, 15 bp, Homo sapiens
gttgaaaattaatgt

SEQ ID NO: 49849 - DNA, 15 bp, Homo sapiens
ttgaaaattaatgtt

SEQ ID NO: 49850 - DNA, 15 bp, Homo sapiens
tgaaaattaatgttt

SEQ ID NO: 49851 - DNA, 15 bp, Homo sapiens
gaaaattaatgtttt

SEQ ID NO: 49852 - DNA, 15 bp, Homo sapiens
aaaattaatgtttta

SEQ ID NO: 49853 - DNA, 15 bp, Homo sapiens
aaattaatgttttaa

SEQ ID NO: 49854 - DNA, 15 bp, Homo sapiens
aattaatgttttaat

SEQ ID NO: 49855 - DNA, 15 bp, Homo sapiens
attaatgttttaatc

SEQ ID NO: 49856 - DNA, 15 bp, Homo sapiens
ttaatgttttaatca

SEQ ID NO: 49857 - DNA, 15 bp, Homo sapiens
taatgttttaatcac

SEQ ID NO: 49858 - DNA, 15 bp, Homo sapiens
aatgttttaatcact

SEQ ID NO: 49859 - DNA, 15 bp, Homo sapiens
atgttttaatcacta

SEQ ID NO: 49860 - DNA, 15 bp, Homo sapiens
tgttttaatcactaa

SEQ ID NO: 49861 - DNA, 15 bp, Homo sapiens
gttttaatcactaaa

SEQ ID NO: 49862 - DNA, 15 bp, Homo sapiens
ttttaatcactaaaa

SEQ ID NO: 49863 - DNA, 15 bp, Homo sapiens
tttaatcactaaaat

SEQ ID NO: 49864 - DNA, 15 bp, Homo sapiens
ttaatcactaaaatc

SEQ ID NO: 49865 - DNA, 15 bp, Homo sapiens
taatcactaaaatca

SEQ ID NO: 49866 - DNA, 15 bp, Homo sapiens
aatcactaaaatcaa

SEQ ID NO: 49867 - DNA, 15 bp, Homo sapiens
atcactaaaatcaaa

SEQ ID NO: 49868 - DNA, 15 bp, Homo sapiens
tcactaaaatcaaat

SEQ ID NO: 49869 - DNA, 15 bp, Homo sapiens
cactaaaatcaaatc

SEQ ID NO: 49870 - DNA, 15 bp, Homo sapiens
actaaaatcaaatcc

SEQ ID NO: 49871 - DNA, 15 bp, Homo sapiens
ctaaaatcaaatcca

SEQ ID NO: 49872 - DNA, 15 bp, Homo sapiens
taaaatcaaatccat

SEQ ID NO: 49873 - DNA, 15 bp, Homo sapiens
aaaatcaaatccata

SEQ ID NO: 49874 - DNA, 15 bp, Homo sapiens
aaatcaaatccatat

SEQ ID NO: 49875 - DNA, 15 bp, Homo sapiens
aatcaaatccatatt

SEQ ID NO: 49876 - DNA, 15 bp, Homo sapiens
atcaaatccatatta

SEQ ID NO: 49877 - DNA, 15 bp, Homo sapiens
tcaaatccatattat

SEQ ID NO: 49878 - DNA, 15 bp, Homo sapiens
caaatccatattatg

SEQ ID NO: 49879 - DNA, 15 bp, Homo sapiens
aaatccatattatgg

SEQ ID NO: 49880 - DNA, 15 bp, Homo sapiens
aatccatattatggg

SEQ ID NO: 49881 - DNA, 15 bp, Homo sapiens
atccatattatgggc

SEQ ID NO: 49882 - DNA, 15 bp, Homo sapiens
tccatattatgggca

SEQ ID NO: 49883 - DNA, 15 bp, Homo sapiens
ccatattatgggcac

SEQ ID NO: 49884 - DNA, 15 bp, Homo sapiens
catattatgggcacc

SEQ ID NO: 49885 - DNA, 15 bp, Homo sapiens
atattatgggcacct

SEQ ID NO: 49886 - DNA, 15 bp, Homo sapiens
tattatgggcacctg

SEQ ID NO: 49887 - DNA, 15 bp, Homo sapiens
attatgggcacctga

SEQ ID NO: 49888 - DNA, 15 bp, Homo sapiens
ttatgggcacctgaa

SEQ ID NO: 49889 - DNA, 15 bp, Homo sapiens
tatgggcacctgaaa

SEQ ID NO: 49890 - DNA, 15 bp, Homo sapiens
atgggcacctgaaat

SEQ ID NO: 49891 - DNA, 15 bp, Homo sapiens
tgggcacctgaaatg

SEQ ID NO: 49892 - DNA, 15 bp, Homo sapiens
gggcacctgaaatgg

SEQ ID NO: 49893 - DNA, 15 bp, Homo sapiens
ggcacctgaaatggg

SEQ ID NO: 49894 - DNA, 15 bp, Homo sapiens
gcacctgaaatggga

SEQ ID NO: 49895 - DNA, 15 bp, Homo sapiens
cacctgaaatgggag

SEQ ID NO: 49896 - DNA, 15 bp, Homo sapiens
acctgaaatgggagt

SEQ ID NO: 49897 - DNA, 15 bp, Homo sapiens
cctgaaatgggagtg

SEQ ID NO: 49898 - DNA, 15 bp, Homo sapiens
ctgaaatgggagtgc

SEQ ID NO: 49899 - DNA, 15 bp, Homo sapiens
tgaaatgggagtgcc

SEQ ID NO: 49900 - DNA, 15 bp, Homo sapiens
gaaatgggagtgcct

SEQ ID NO: 49901 - DNA, 15 bp, Homo sapiens
aaatgggagtgcctt

SEQ ID NO: 49902 - DNA, 15 bp, Homo sapiens
aatgggagtgccttt

SEQ ID NO: 49903 - DNA, 15 bp, Homo sapiens
atgggagtgcctttc

SEQ ID NO: 49904 - DNA, 15 bp, Homo sapiens
tgggagtgcctttct

SEQ ID NO: 49905 - DNA, 15 bp, Homo sapiens
gggagtgcctttctt

SEQ ID NO: 49906 - DNA, 15 bp, Homo sapiens
ggagtgcctttcttc

SEQ ID NO: 49907 - DNA, 15 bp, Homo sapiens
gagtgcctttcttct

SEQ ID NO: 49908 - DNA, 15 bp, Homo sapiens
agtgcctttcttctc

SEQ ID NO: 49909 - DNA, 15 bp, Homo sapiens
gtgcctttcttctca

SEQ ID NO: 49910 - DNA, 15 bp, Homo sapiens
tgcctttcttctcaa

SEQ ID NO: 49911 - DNA, 15 bp, Homo sapiens
gcctttcttctcaaa

SEQ ID NO: 49912 - DNA, 15 bp, Homo sapiens
cctttcttctcaaaa

SEQ ID NO: 49913 - DNA, 15 bp, Homo sapiens
ctttcttctcaaaag

SEQ ID NO: 49914 - DNA, 15 bp, Homo sapiens
tttcttctcaaaaga

SEQ ID NO: 49915 - DNA, 15 bp, Homo sapiens
ttcttctcaaaagat

SEQ ID NO: 49916 - DNA, 15 bp, Homo sapiens
tcttctcaaaagata

SEQ ID NO: 49917 - DNA, 15 bp, Homo sapiens
cttctcaaaagatat

SEQ ID NO: 49918 - DNA, 15 bp, Homo sapiens
ttctcaaaagatatt

SEQ ID NO: 49919 - DNA, 15 bp, Homo sapiens
tctcaaaagatattc

SEQ ID NO: 49920 - DNA, 15 bp, Homo sapiens
ctcaaaagatattca

SEQ ID NO: 49921 - DNA, 15 bp, Homo sapiens
tcaaaagatattcag

SEQ ID NO: 49922 - DNA, 15 bp, Homo sapiens
caaaagatattcaga

SEQ ID NO: 49923 - DNA, 15 bp, Homo sapiens
aaaagatattcagag

SEQ ID NO: 49924 - DNA, 15 bp, Homo sapiens
aaagatattcagagt

SEQ ID NO: 49925 - DNA, 15 bp, Homo sapiens
aagatattcagagtt

SEQ ID NO: 49926 - DNA, 15 bp, Homo sapiens
agatattcagagttt

SEQ ID NO: 49927 - DNA, 15 bp, Homo sapiens
gatattcagagttta

SEQ ID NO: 49928 - DNA, 15 bp, Homo sapiens
atattcagagtttag

SEQ ID NO: 49929 - DNA, 15 bp, Homo sapiens
tattcagagtttagc

SEQ ID NO: 49930 - DNA, 15 bp, Homo sapiens
attcagagtttagct

SEQ ID NO: 49931 - DNA, 15 bp, Homo sapiens
ttcagagtttagcta

SEQ ID NO: 49932 - DNA, 15 bp, Homo sapiens
tcagagtttagctat

SEQ ID NO: 49933 - DNA, 15 bp, Homo sapiens
cagagtttagctatc

SEQ ID NO: 49934 - DNA, 15 bp, Homo sapiens
agagtttagctatca

SEQ ID NO: 49935 - DNA, 15 bp, Homo sapiens
gagtttagctatcat

SEQ ID NO: 49936 - DNA, 15 bp, Homo sapiens
agtttagctatcatc

SEQ ID NO: 49937 - DNA, 15 bp, Homo sapiens
gtttagctatcatcc

SEQ ID NO: 49938 - DNA, 15 bp, Homo sapiens
tttagctatcatcca

SEQ ID NO: 49939 - DNA, 15 bp, Homo sapiens
ttagctatcatccac

SEQ ID NO: 49940 - DNA, 15 bp, Homo sapiens
tagctatcatccact

SEQ ID NO: 49941 - DNA, 15 bp, Homo sapiens
agctatcatccactc

SEQ ID NO: 49942 - DNA, 15 bp, Homo sapiens
gctatcatccactct

SEQ ID NO: 49943 - DNA, 15 bp, Homo sapiens
ctatcatccactctc

SEQ ID NO: 49944 - DNA, 15 bp, Homo sapiens
tatcatccactctct

SEQ ID NO: 49945 - DNA, 15 bp, Homo sapiens
atcatccactctcta

SEQ ID NO: 49946 - DNA, 15 bp, Homo sapiens
tcatccactctctat

SEQ ID NO: 49947 - DNA, 15 bp, Homo sapiens
catccactctctatg

SEQ ID NO: 49948 - DNA, 15 bp, Homo sapiens
atccactctctatgc

SEQ ID NO: 49949 - DNA, 15 bp, Homo sapiens
tccactctctatgct

SEQ ID NO: 49950 - DNA, 15 bp, Homo sapiens
ccactctctatgctg

SEQ ID NO: 49951 - DNA, 15 bp, Homo sapiens
cactctctatgctgt

SEQ ID NO: 49952 - DNA, 15 bp, Homo sapiens
actctctatgctgtc

SEQ ID NO: 49953 - DNA, 15 bp, Homo sapiens
ctctctatgctgtct

SEQ ID NO: 49954 - DNA, 15 bp, Homo sapiens
tctctatgctgtctg

SEQ ID NO: 49955 - DNA, 15 bp, Homo sapiens
ctctatgctgtctgt

SEQ ID NO: 49956 - DNA, 15 bp, Homo sapiens
tctatgctgtctgtt

SEQ ID NO: 49957 - DNA, 15 bp, Homo sapiens
ctatgctgtctgttt

SEQ ID NO: 49958 - DNA, 15 bp, Homo sapiens
tatgctgtctgtttt

SEQ ID NO: 49959 - DNA, 15 bp, Homo sapiens
atgctgtctgttttt

SEQ ID NO: 49960 - DNA, 15 bp, Homo sapiens
tgctgtctgttttta

SEQ ID NO: 49961 - DNA, 15 bp, Homo sapiens
gctgtctgtttttat

SEQ ID NO: 49962 - DNA, 15 bp, Homo sapiens
ctgtctgtttttatt

SEQ ID NO: 49963 - DNA, 15 bp, Homo sapiens
tgtctgtttttattc

SEQ ID NO: 49964 - DNA, 15 bp, Homo sapiens
gtctgtttttattca

SEQ ID NO: 49965 - DNA, 15 bp, Homo sapiens
tctgtttttattcag

SEQ ID NO: 49966 - DNA, 15 bp, Homo sapiens
ctgtttttattcagg

SEQ ID NO: 49967 - DNA, 15 bp, Homo sapiens
tgtttttattcagga

SEQ ID NO: 49968 - DNA, 15 bp, Homo sapiens
gtttttattcaggaa

SEQ ID NO: 49969 - DNA, 15 bp, Homo sapiens
tttttattcaggaag

SEQ ID NO: 49970 - DNA, 15 bp, Homo sapiens
ttttattcaggaagt

SEQ ID NO: 49971 - DNA, 15 bp, Homo sapiens
tttattcaggaagtc

SEQ ID NO: 49972 - DNA, 15 bp, Homo sapiens
ttattcaggaagtct

SEQ ID NO: 49973 - DNA, 15 bp, Homo sapiens
tattcaggaagtctg

SEQ ID NO: 49974 - DNA, 15 bp, Homo sapiens
attcaggaagtctga

SEQ ID NO: 49975 - DNA, 15 bp, Homo sapiens
ttcaggaagtctgaa

SEQ ID NO: 49976 - DNA, 15 bp, Homo sapiens
tcaggaagtctgaaa

SEQ ID NO: 49977 - DNA, 15 bp, Homo sapiens
caggaagtctgaaat

SEQ ID NO: 49978 - DNA, 15 bp, Homo sapiens
aggaagtctgaaatt

SEQ ID NO: 49979 - DNA, 15 bp, Homo sapiens
ggaagtctgaaattg

SEQ ID NO: 49980 - DNA, 15 bp, Homo sapiens
gaagtctgaaattgt

SEQ ID NO: 49981 - DNA, 15 bp, Homo sapiens
aagtctgaaattgtt

SEQ ID NO: 49982 - DNA, 15 bp, Homo sapiens
agtctgaaattgttc

SEQ ID NO: 49983 - DNA, 15 bp, Homo sapiens
gtctgaaattgttct

SEQ ID NO: 49984 - DNA, 15 bp, Homo sapiens
tctgaaattgttctt

SEQ ID NO: 49985 - DNA, 15 bp, Homo sapiens
ctgaaattgttcttc

SEQ ID NO: 49986 - DNA, 15 bp, Homo sapiens
tgaaattgttcttct

SEQ ID NO: 49987 - DNA, 15 bp, Homo sapiens
gaaattgttcttctg

SEQ ID NO: 49988 - DNA, 15 bp, Homo sapiens
aaattgttcttctgt

SEQ ID NO: 49989 - DNA, 15 bp, Homo sapiens
aattgttcttctgta

SEQ ID NO: 49990 - DNA, 15 bp, Homo sapiens
attgttcttctgtac

SEQ ID NO: 49991 - DNA, 15 bp, Homo sapiens
ttgttcttctgtact

SEQ ID NO: 49992 - DNA, 15 bp, Homo sapiens
tgttcttctgtactc

SEQ ID NO: 49993 - DNA, 15 bp, Homo sapiens
gttcttctgtactcc

SEQ ID NO: 49994 - DNA, 15 bp, Homo sapiens
ttcttctgtactccg

SEQ ID NO: 49995 - DNA, 15 bp, Homo sapiens
tcttctgtactccgg

SEQ ID NO: 49996 - DNA, 15 bp, Homo sapiens
cttctgtactccggg

SEQ ID NO: 49997 - DNA, 15 bp, Homo sapiens
ttctgtactccggga

SEQ ID NO: 49998 - DNA, 15 bp, Homo sapiens
tctgtactccgggat

SEQ ID NO: 49999 - DNA, 15 bp, Homo sapiens
ctgtactccgggatt

SEQ ID NO: 50000 - DNA, 15 bp, Homo sapiens
tgtactccgggatta

SEQ ID NO: 50001 - DNA, 15 bp, Homo sapiens
gtactccgggattaa

SEQ ID NO: 50002 - DNA, 15 bp, Homo sapiens
tactccgggattaat

SEQ ID NO: 50003 - DNA, 15 bp, Homo sapiens
actccgggattaatt

SEQ ID NO: 50004 - DNA, 15 bp, Homo sapiens
ctccgggattaattt

SEQ ID NO: 50005 - DNA, 15 bp, Homo sapiens
tccgggattaatttc

SEQ ID NO: 50006 - DNA, 15 bp, Homo sapiens
ccgggattaatttcc

SEQ ID NO: 50007 - DNA, 15 bp, Homo sapiens
cgggattaatttcct

SEQ ID NO: 50008 - DNA, 15 bp, Homo sapiens
gggattaatttccta

SEQ ID NO: 50009 - DNA, 15 bp, Homo sapiens
ggattaatttcctac

SEQ ID NO: 50010 - DNA, 15 bp, Homo sapiens
gattaatttcctaca

SEQ ID NO: 50011 - DNA, 15 bp, Homo sapiens
attaatttcctacat

SEQ ID NO: 50012 - DNA, 15 bp, Homo sapiens
ttaatttcctacatc

SEQ ID NO: 50013 - DNA, 15 bp, Homo sapiens
taatttcctacatct

SEQ ID NO: 50014 - DNA, 15 bp, Homo sapiens
aatttcctacatctc

SEQ ID NO: 50015 - DNA, 15 bp, Homo sapiens
atttcctacatctca

SEQ ID NO: 50016 - DNA, 15 bp, Homo sapiens
tttcctacatctcaa

SEQ ID NO: 50017 - DNA, 15 bp, Homo sapiens
ttcctacatctcaaa

SEQ ID NO: 50018 - DNA, 15 bp, Homo sapiens
tcctacatctcaaaa

SEQ ID NO: 50019 - DNA, 15 bp, Homo sapiens
cctacatctcaaaat

SEQ ID NO: 50020 - DNA, 15 bp, Homo sapiens
ctacatctcaaaatg

SEQ ID NO: 50021 - DNA, 15 bp, Homo sapiens
tacatctcaaaatgt

SEQ ID NO: 50022 - DNA, 15 bp, Homo sapiens
acatctcaaaatgtt

SEQ ID NO: 50023 - DNA, 15 bp, Homo sapiens
catctcaaaatgtta

SEQ ID NO: 50024 - DNA, 15 bp, Homo sapiens
atctcaaaatgttaa

SEQ ID NO: 50025 - DNA, 15 bp, Homo sapiens
tctcaaaatgttaat

SEQ ID NO: 50026 - DNA, 15 bp, Homo sapiens
ctcaaaatgttaata

SEQ ID NO: 50027 - DNA, 15 bp, Homo sapiens
tcaaaatgttaataa

SEQ ID NO: 50028 - DNA, 15 bp, Homo sapiens
caaaatgttaataaa

SEQ ID NO: 50029 - DNA, 15 bp, Homo sapiens
aaaatgttaataaac

SEQ ID NO: 50030 - DNA, 15 bp, Homo sapiens
aaatgttaataaact

SEQ ID NO: 50031 - DNA, 15 bp, Homo sapiens
aatgttaataaacta

SEQ ID NO: 50032 - DNA, 15 bp, Homo sapiens
atgttaataaactac

SEQ ID NO: 50033 - DNA, 15 bp, Homo sapiens
tgttaataaactact

SEQ ID NO: 50034 - DNA, 15 bp, Homo sapiens
gttaataaactactt

SEQ ID NO: 50035 - DNA, 15 bp, Homo sapiens
ttaataaactacttg

SEQ ID NO: 50036 - DNA, 15 bp, Homo sapiens
taataaactacttga

SEQ ID NO: 50037 - DNA, 15 bp, Homo sapiens
aataaactacttgaa

SEQ ID NO: 50038 - DNA, 15 bp, Homo sapiens
ataaactacttgaac

SEQ ID NO: 50039 - DNA, 15 bp, Homo sapiens
taaactacttgaaca

SEQ ID NO: 50040 - DNA, 15 bp, Homo sapiens
aaactacttgaacat

SEQ ID NO: 50041 - DNA, 15 bp, Homo sapiens
aactacttgaacatg

SEQ ID NO: 50042 - DNA, 15 bp, Homo sapiens
actacttgaacatga

SEQ ID NO: 50043 - DNA, 15 bp, Homo sapiens
ctacttgaacatgac

SEQ ID NO: 50044 - DNA, 15 bp, Homo sapiens
tacttgaacatgacc

SEQ ID NO: 50045 - DNA, 15 bp, Homo sapiens
acttgaacatgacct

SEQ ID NO: 50046 - DNA, 15 bp, Homo sapiens
cttgaacatgacctt

SEQ ID NO: 50047 - DNA, 15 bp, Homo sapiens
ttgaacatgaccttt

SEQ ID NO: 50048 - DNA, 15 bp, Homo sapiens
tgaacatgacctttc

SEQ ID NO: 50049 - DNA, 15 bp, Homo sapiens
gaacatgacctttcc

SEQ ID NO: 50050 - DNA, 15 bp, Homo sapiens
aacatgacctttcca

SEQ ID NO: 50051 - DNA, 15 bp, Homo sapiens
acatgacctttccat

SEQ ID NO: 50052 - DNA, 15 bp, Homo sapiens
catgacctttccatt

SEQ ID NO: 50053 - DNA, 15 bp, Homo sapiens
atgacctttccattc

SEQ ID NO: 50054 - DNA, 15 bp, Homo sapiens
tgacctttccattct

SEQ ID NO: 50055 - DNA, 15 bp, Homo sapiens
gacctttccattctg

SEQ ID NO: 50056 - DNA, 15 bp, Homo sapiens
acctttccattctgt

SEQ ID NO: 50057 - DNA, 15 bp, Homo sapiens
cctttccattctgta

SEQ ID NO: 50058 - DNA, 15 bp, Homo sapiens
ctttccattctgtaa

SEQ ID NO: 50059 - DNA, 15 bp, Homo sapiens
tttccattctgtaaa

SEQ ID NO: 50060 - DNA, 15 bp, Homo sapiens
ttccattctgtaaat

SEQ ID NO: 50061 - DNA, 15 bp, Homo sapiens
tccattctgtaaatt

SEQ ID NO: 50062 - DNA, 15 bp, Homo sapiens
ccattctgtaaattt

SEQ ID NO: 50063 - DNA, 15 bp, Homo sapiens
cattctgtaaatttc

SEQ ID NO: 50064 - DNA, 15 bp, Homo sapiens
attctgtaaatttcc

SEQ ID NO: 50065 - DNA, 15 bp, Homo sapiens
ttctgtaaatttcct

SEQ ID NO: 50066 - DNA, 15 bp, Homo sapiens
tctgtaaatttcctt

SEQ ID NO: 50067 - DNA, 15 bp, Homo sapiens
ctgtaaatttcctta

SEQ ID NO: 50068 - DNA, 15 bp, Homo sapiens
tgtaaatttccttaa

SEQ ID NO: 50069 - DNA, 15 bp, Homo sapiens
gtaaatttccttaag

SEQ ID NO: 50070 - DNA, 15 bp, Homo sapiens
taaatttccttaaga

SEQ ID NO: 50071 - DNA, 15 bp, Homo sapiens
aaatttccttaagag

SEQ ID NO: 50072 - DNA, 15 bp, Homo sapiens
aatttccttaagagt

SEQ ID NO: 50073 - DNA, 15 bp, Homo sapiens
atttccttaagagta

SEQ ID NO: 50074 - DNA, 15 bp, Homo sapiens
tttccttaagagtaa

SEQ ID NO: 50075 - DNA, 15 bp, Homo sapiens
ttccttaagagtaag

SEQ ID NO: 50076 - DNA, 15 bp, Homo sapiens
tccttaagagtaagt

SEQ ID NO: 50077 - DNA, 15 bp, Homo sapiens
ccttaagagtaagtc

SEQ ID NO: 50078 - DNA, 15 bp, Homo sapiens
cttaagagtaagtct

SEQ ID NO: 50079 - DNA, 15 bp, Homo sapiens
ttaagagtaagtcta

SEQ ID NO: 50080 - DNA, 15 bp, Homo sapiens
taagagtaagtctac

SEQ ID NO: 50081 - DNA, 15 bp, Homo sapiens
aagagtaagtctacg

SEQ ID NO: 50082 - DNA, 15 bp, Homo sapiens
agagtaagtctacga

SEQ ID NO: 50083 - DNA, 15 bp, Homo sapiens
gagtaagtctacgat

SEQ ID NO: 50084 - DNA, 15 bp, Homo sapiens
agtaagtctacgatt

SEQ ID NO: 50085 - DNA, 15 bp, Homo sapiens
gtaagtctacgattg

SEQ ID NO: 50086 - DNA, 15 bp, Homo sapiens
taagtctacgattga

SEQ ID NO: 50087 - DNA, 15 bp, Homo sapiens
aagtctacgattgag

SEQ ID NO: 50088 - DNA, 15 bp, Homo sapiens
agtctacgattgaga

SEQ ID NO: 50089 - DNA, 15 bp, Homo sapiens
gtctacgattgagac

SEQ ID NO: 50090 - DNA, 15 bp, Homo sapiens
tctacgattgagacc

SEQ ID NO: 50091 - DNA, 15 bp, Homo sapiens
ctacgattgagaccc

SEQ ID NO: 50092 - DNA, 15 bp, Homo sapiens
tacgattgagaccca

SEQ ID NO: 50093 - DNA, 15 bp, Homo sapiens
acgattgagacccaa

SEQ ID NO: 50094 - DNA, 15 bp, Homo sapiens
cgattgagacccaaa

SEQ ID NO: 50095 - DNA, 15 bp, Homo sapiens
gattgagacccaaag

SEQ ID NO: 50096 - DNA, 15 bp, Homo sapiens
attgagacccaaagc

SEQ ID NO: 50097 - DNA, 15 bp, Homo sapiens
ttgagacccaaagct

SEQ ID NO: 50098 - DNA, 15 bp, Homo sapiens
tgagacccaaagctg

SEQ ID NO: 50099 - DNA, 15 bp, Homo sapiens
gagacccaaagctgc

SEQ ID NO: 50100 - DNA, 15 bp, Homo sapiens
agacccaaagctgct

SEQ ID NO: 50101 - DNA, 15 bp, Homo sapiens
gacccaaagctgctg

SEQ ID NO: 50102 - DNA, 15 bp, Homo sapiens
acccaaagctgctgg

SEQ ID NO: 50103 - DNA, 15 bp, Homo sapiens
cccaaagctgctggc

SEQ ID NO: 50104 - DNA, 15 bp, Homo sapiens
ccaaagctgctggct

SEQ ID NO: 50105 - DNA, 15 bp, Homo sapiens
caaagctgctggctg

SEQ ID NO: 50106 - DNA, 15 bp, Homo sapiens
aaagctgctggctgt

SEQ ID NO: 50107 - DNA, 15 bp, Homo sapiens
aagctgctggctgtg

SEQ ID NO: 50108 - DNA, 15 bp, Homo sapiens
agctgctggctgtgt

SEQ ID NO: 50109 - DNA, 15 bp, Homo sapiens
gctgctggctgtgtt

SEQ ID NO: 50110 - DNA, 15 bp, Homo sapiens
ctgctggctgtgtta

SEQ ID NO: 50111 - DNA, 15 bp, Homo sapiens
tgctggctgtgttat

SEQ ID NO: 50112 - DNA, 15 bp, Homo sapiens
gctggctgtgttata

SEQ ID NO: 50113 - DNA, 15 bp, Homo sapiens
ctggctgtgttatat

SEQ ID NO: 50114 - DNA, 15 bp, Homo sapiens
tggctgtgttatatt

SEQ ID NO: 50115 - DNA, 15 bp, Homo sapiens
ggctgtgttatattt

SEQ ID NO: 50116 - DNA, 15 bp, Homo sapiens
gctgtgttatatttc

SEQ ID NO: 50117 - DNA, 15 bp, Homo sapiens
ctgtgttatatttca

SEQ ID NO: 50118 - DNA, 15 bp, Homo sapiens
tgtgttatatttcac

SEQ ID NO: 50119 - DNA, 15 bp, Homo sapiens
gtgttatatttcaca

SEQ ID NO: 50120 - DNA, 15 bp, Homo sapiens
tgttatatttcacag

SEQ ID NO: 50121 - DNA, 15 bp, Homo sapiens
gttatatttcacagt

SEQ ID NO: 50122 - DNA, 15 bp, Homo sapiens
ttatatttcacagtt

SEQ ID NO: 50123 - DNA, 15 bp, Homo sapiens
tatatttcacagttc

SEQ ID NO: 50124 - DNA, 15 bp, Homo sapiens
atatttcacagttca

SEQ ID NO: 50125 - DNA, 15 bp, Homo sapiens
tatttcacagttcac

SEQ ID NO: 50126 - DNA, 15 bp, Homo sapiens
atttcacagttcaca

SEQ ID NO: 50127 - DNA, 15 bp, Homo sapiens
tttcacagttcacag

SEQ ID NO: 50128 - DNA, 15 bp, Homo sapiens
ttcacagttcacagt

SEQ ID NO: 50129 - DNA, 15 bp, Homo sapiens
tcacagttcacagtt

SEQ ID NO: 50130 - DNA, 15 bp, Homo sapiens
cacagttcacagttc

SEQ ID NO: 50131 - DNA, 15 bp, Homo sapiens
acagttcacagttct

SEQ ID NO: 50132 - DNA, 15 bp, Homo sapiens
cagttcacagttctc

SEQ ID NO: 50133 - DNA, 15 bp, Homo sapiens
agttcacagttctct

SEQ ID NO: 50134 - DNA, 15 bp, Homo sapiens
gttcacagttctctc

SEQ ID NO: 50135 - DNA, 15 bp, Homo sapiens
ttcacagttctctct

SEQ ID NO: 50136 - DNA, 15 bp, Homo sapiens
tcacagttctctctc

SEQ ID NO: 50137 - DNA, 15 bp, Homo sapiens
cacagttctctctct

SEQ ID NO: 50138 - DNA, 15 bp, Homo sapiens
acagttctctctctc

SEQ ID NO: 50139 - DNA, 15 bp, Homo sapiens
cagttctctctctct

SEQ ID NO: 50140 - DNA, 15 bp, Homo sapiens
agttctctctctctc

SEQ ID NO: 50141 - DNA, 15 bp, Homo sapiens
gttctctctctctct

SEQ ID NO: 50142 - DNA, 15 bp, Homo sapiens
ttctctctctctctc

SEQ ID NO: 50143 - DNA, 15 bp, Homo sapiens
tctctctctctctcc

SEQ ID NO: 50144 - DNA, 15 bp, Homo sapiens
ctctctctctctccc

SEQ ID NO: 50145 - DNA, 15 bp, Homo sapiens
tctctctctctcccc

SEQ ID NO: 50146 - DNA, 15 bp, Homo sapiens
ctctctctctccccc

SEQ ID NO: 50147 - DNA, 15 bp, Homo sapiens
tctctctctccccct

SEQ ID NO: 50148 - DNA, 15 bp, Homo sapiens
ctctctctccccctc

SEQ ID NO: 50149 - DNA, 15 bp, Homo sapiens
tctctctccccctct

SEQ ID NO: 50150 - DNA, 15 bp, Homo sapiens
ctctctccccctcta

SEQ ID NO: 50151 - DNA, 15 bp, Homo sapiens
tctctccccctctac

SEQ ID NO: 50152 - DNA, 15 bp, Homo sapiens
ctctccccctctaca

SEQ ID NO: 50153 - DNA, 15 bp, Homo sapiens
tctccccctctacac

SEQ ID NO: 50154 - DNA, 15 bp, Homo sapiens
ctccccctctacaca

SEQ ID NO: 50155 - DNA, 15 bp, Homo sapiens
tccccctctacacac

SEQ ID NO: 50156 - DNA, 15 bp, Homo sapiens
ccccctctacacaca

SEQ ID NO: 50157 - DNA, 15 bp, Homo sapiens
cccctctacacacac

SEQ ID NO: 50158 - DNA, 15 bp, Homo sapiens
ccctctacacacacg

SEQ ID NO: 50159 - DNA, 15 bp, Homo sapiens
cctctacacacacgc

SEQ ID NO: 50160 - DNA, 15 bp, Homo sapiens
ctctacacacacgcg

SEQ ID NO: 50161 - DNA, 15 bp, Homo sapiens
tctacacacacgcgc

SEQ ID NO: 50162 - DNA, 15 bp, Homo sapiens
ctacacacacgcgca

SEQ ID NO: 50163 - DNA, 15 bp, Homo sapiens
tacacacacgcgcac

SEQ ID NO: 50164 - DNA, 15 bp, Homo sapiens
acacacacgcgcacg

SEQ ID NO: 50165 - DNA, 15 bp, Homo sapiens
cacacacgcgcacgt

SEQ ID NO: 50166 - DNA, 15 bp, Homo sapiens
acacacgcgcacgtg

SEQ ID NO: 50167 - DNA, 15 bp, Homo sapiens
cacacgcgcacgtgc

SEQ ID NO: 50168 - DNA, 15 bp, Homo sapiens
acacgcgcacgtgca

SEQ ID NO: 50169 - DNA, 15 bp, Homo sapiens
cacgcgcacgtgcac

SEQ ID NO: 50170 - DNA, 15 bp, Homo sapiens
acgcgcacgtgcacg

SEQ ID NO: 50171 - DNA, 15 bp, Homo sapiens
cgcgcacgtgcacgc

SEQ ID NO: 50172 - DNA, 15 bp, Homo sapiens
gcgcacgtgcacgca

SEQ ID NO: 50173 - DNA, 15 bp, Homo sapiens
cgcacgtgcacgcac

SEQ ID NO: 50174 - DNA, 15 bp, Homo sapiens
gcacgtgcacgcaca

SEQ ID NO: 50175 - DNA, 15 bp, Homo sapiens
cacgtgcacgcacac

SEQ ID NO: 50176 - DNA, 15 bp, Homo sapiens
acgtgcacgcacaca

SEQ ID NO: 50177 - DNA, 15 bp, Homo sapiens
cgtgcacgcacacac

SEQ ID NO: 50178 - DNA, 15 bp, Homo sapiens
gtgcacgcacacaca

SEQ ID NO: 50179 - DNA, 15 bp, Homo sapiens
tgcacgcacacacac

SEQ ID NO: 50180 - DNA, 15 bp, Homo sapiens
gcacgcacacacaca

SEQ ID NO: 50181 - DNA, 15 bp, Homo sapiens
cacgcacacacacac

SEQ ID NO: 50182 - DNA, 15 bp, Homo sapiens
acgcacacacacaca

SEQ ID NO: 50183 - DNA, 15 bp, Homo sapiens
cgcacacacacacac

SEQ ID NO: 50184 - DNA, 15 bp, Homo sapiens
gcacacacacacaca

SEQ ID NO: 50185 - DNA, 15 bp, Homo sapiens
cacacacagagagag

SEQ ID NO: 50186 - DNA, 15 bp, Homo sapiens
acacacagagagaga

SEQ ID NO: 50187 - DNA, 15 bp, Homo sapiens
cacacagagagagag

SEQ ID NO: 50188 - DNA, 15 bp, Homo sapiens
acacagagagagaga

SEQ ID NO: 50189 - DNA, 15 bp, Homo sapiens
cacagagagagagag

SEQ ID NO: 50190 - DNA, 15 bp, Homo sapiens
acagagagagagaga

SEQ ID NO: 50191 - DNA, 15 bp, Homo sapiens
cagagagagagagag

SEQ ID NO: 50192 - DNA, 15 bp, Homo sapiens
agagagagagagaga

SEQ ID NO: 50193 - DNA, 15 bp, Homo sapiens
gagagagagagagag

SEQ ID NO: 50194 - DNA, 15 bp, Homo sapiens
agagagagagagagc

SEQ ID NO: 50195 - DNA, 15 bp, Homo sapiens
gagagagagagagca

SEQ ID NO: 50196 - DNA, 15 bp, Homo sapiens
agagagagagagcac

SEQ ID NO: 50197 - DNA, 15 bp, Homo sapiens
gagagagagagcacc

SEQ ID NO: 50198 - DNA, 15 bp, Homo sapiens
agagagagagcaccc

SEQ ID NO: 50199 - DNA, 15 bp, Homo sapiens
gagagagagcacccc

SEQ ID NO: 50200 - DNA, 15 bp, Homo sapiens
agagagagcacccca

SEQ ID NO: 50201 - DNA, 15 bp, Homo sapiens
gagagagcaccccag

SEQ ID NO: 50202 - DNA, 15 bp, Homo sapiens
agagagcaccccagg

SEQ ID NO: 50203 - DNA, 15 bp, Homo sapiens
gagagcaccccaggt

SEQ ID NO: 50204 - DNA, 15 bp, Homo sapiens
agagcaccccaggtt

SEQ ID NO: 50205 - DNA, 15 bp, Homo sapiens
gagcaccccaggttt

SEQ ID NO: 50206 - DNA, 15 bp, Homo sapiens
agcaccccaggtttt

SEQ ID NO: 50207 - DNA, 15 bp, Homo sapiens
gcaccccaggtttta

SEQ ID NO: 50208 - DNA, 15 bp, Homo sapiens
caccccaggttttag

SEQ ID NO: 50209 - DNA, 15 bp, Homo sapiens
accccaggttttaga

SEQ ID NO: 50210 - DNA, 15 bp, Homo sapiens
ccccaggttttagaa

SEQ ID NO: 50211 - DNA, 15 bp, Homo sapiens
cccaggttttagaag

SEQ ID NO: 50212 - DNA, 15 bp, Homo sapiens
ccaggttttagaaga

SEQ ID NO: 50213 - DNA, 15 bp, Homo sapiens
caggttttagaagat

SEQ ID NO: 50214 - DNA, 15 bp, Homo sapiens
aggttttagaagatg

SEQ ID NO: 50215 - DNA, 15 bp, Homo sapiens
ggttttagaagatga

SEQ ID NO: 50216 - DNA, 15 bp, Homo sapiens
gttttagaagatgaa

SEQ ID NO: 50217 - DNA, 15 bp, Homo sapiens
ttttagaagatgaat

SEQ ID NO: 50218 - DNA, 15 bp, Homo sapiens
tttagaagatgaatg

SEQ ID NO: 50219 - DNA, 15 bp, Homo sapiens
ttagaagatgaatgt

SEQ ID NO: 50220 - DNA, 15 bp, Homo sapiens
tagaagatgaatgta

SEQ ID NO: 50221 - DNA, 15 bp, Homo sapiens
agaagatgaatgtaa

SEQ ID NO: 50222 - DNA, 15 bp, Homo sapiens
gaagatgaatgtaaa

SEQ ID NO: 50223 - DNA, 15 bp, Homo sapiens
aagatgaatgtaaaa

SEQ ID NO: 50224 - DNA, 15 bp, Homo sapiens
agatgaatgtaaaaa

SEQ ID NO: 50225 - DNA, 15 bp, Homo sapiens
gatgaatgtaaaaag

SEQ ID NO: 50226 - DNA, 15 bp, Homo sapiens
atgaatgtaaaaaga

SEQ ID NO: 50227 - DNA, 15 bp, Homo sapiens
tgaatgtaaaaagaa

SEQ ID NO: 50228 - DNA, 15 bp, Homo sapiens
gaatgtaaaaagaat

SEQ ID NO: 50229 - DNA, 15 bp, Homo sapiens
aatgtaaaaagaatg

SEQ ID NO: 50230 - DNA, 15 bp, Homo sapiens
atgtaaaaagaatgt

SEQ ID NO: 50231 - DNA, 15 bp, Homo sapiens
tgtaaaaagaatgta

SEQ ID NO: 50232 - DNA, 15 bp, Homo sapiens
gtaaaaagaatgtaa

SEQ ID NO: 50233 - DNA, 15 bp, Homo sapiens
taaaaagaatgtaaa

SEQ ID NO: 50234 - DNA, 15 bp, Homo sapiens
aaaaagaatgtaaac

SEQ ID NO: 50235 - DNA, 15 bp, Homo sapiens
aaaagaatgtaaaca

SEQ ID NO: 50236 - DNA, 15 bp, Homo sapiens
aaagaatgtaaacaa

SEQ ID NO: 50237 - DNA, 15 bp, Homo sapiens
aagaatgtaaacaag

SEQ ID NO: 50238 - DNA, 15 bp, Homo sapiens
agaatgtaaacaagt

SEQ ID NO: 50239 - DNA, 15 bp, Homo sapiens
gaatgtaaacaagtt

SEQ ID NO: 50240 - DNA, 15 bp, Homo sapiens
aatgtaaacaagttc

SEQ ID NO: 50241 - DNA, 15 bp, Homo sapiens
atgtaaacaagttct

SEQ ID NO: 50242 - DNA, 15 bp, Homo sapiens
tgtaaacaagttctc

SEQ ID NO: 50243 - DNA, 15 bp, Homo sapiens
gtaaacaagttctct

SEQ ID NO: 50244 - DNA, 15 bp, Homo sapiens
taaacaagttctctg

SEQ ID NO: 50245 - DNA, 15 bp, Homo sapiens
aaacaagttctctgc

SEQ ID NO: 50246 - DNA, 15 bp, Homo sapiens
aacaagttctctgct

SEQ ID NO: 50247 - DNA, 15 bp, Homo sapiens
acaagttctctgcta

SEQ ID NO: 50248 - DNA, 15 bp, Homo sapiens
caagttctctgctat

SEQ ID NO: 50249 - DNA, 15 bp, Homo sapiens
aagttctctgctata

SEQ ID NO: 50250 - DNA, 15 bp, Homo sapiens
agttctctgctatac

SEQ ID NO: 50251 - DNA, 15 bp, Homo sapiens
gttctctgctatact

SEQ ID NO: 50252 - DNA, 15 bp, Homo sapiens
ttctctgctatacta

SEQ ID NO: 50253 - DNA, 15 bp, Homo sapiens
tctctgctatactat

SEQ ID NO: 50254 - DNA, 15 bp, Homo sapiens
ctctgctatactatc

SEQ ID NO: 50255 - DNA, 15 bp, Homo sapiens
tctgctatactatca

SEQ ID NO: 50256 - DNA, 15 bp, Homo sapiens
ctgctatactatcag

SEQ ID NO: 50257 - DNA, 15 bp, Homo sapiens
tgctatactatcagg

SEQ ID NO: 50258 - DNA, 15 bp, Homo sapiens
gctatactatcaggt

SEQ ID NO: 50259 - DNA, 15 bp, Homo sapiens
ctatactatcaggtg

SEQ ID NO: 50260 - DNA, 15 bp, Homo sapiens
tatactatcaggtgg

SEQ ID NO: 50261 - DNA, 15 bp, Homo sapiens
atactatcaggtggg

SEQ ID NO: 50262 - DNA, 15 bp, Homo sapiens
tactatcaggtgggc

SEQ ID NO: 50263 - DNA, 15 bp, Homo sapiens
actatcaggtgggcg

SEQ ID NO: 50264 - DNA, 15 bp, Homo sapiens
ctatcaggtgggcgt

SEQ ID NO: 50265 - DNA, 15 bp, Homo sapiens
tatcaggtgggcgtg

SEQ ID NO: 50266 - DNA, 15 bp, Homo sapiens
atcaggtgggcgtgc

SEQ ID NO: 50267 - DNA, 15 bp, Homo sapiens
tcaggtgggcgtgcc

SEQ ID NO: 50268 - DNA, 15 bp, Homo sapiens
caggtgggcgtgccc

SEQ ID NO: 50269 - DNA, 15 bp, Homo sapiens
aggtgggcgtgccca

SEQ ID NO: 50270 - DNA, 15 bp, Homo sapiens
ggtgggcgtgcccag

SEQ ID NO: 50271 - DNA, 15 bp, Homo sapiens
gtgggcgtgcccagc

SEQ ID NO: 50272 - DNA, 15 bp, Homo sapiens
tgggcgtgcccagct

SEQ ID NO: 50273 - DNA, 15 bp, Homo sapiens
gggcgtgcccagctc

SEQ ID NO: 50274 - DNA, 15 bp, Homo sapiens
ggcgtgcccagctca

SEQ ID NO: 50275 - DNA, 15 bp, Homo sapiens
gcgtgcccagctcac

SEQ ID NO: 50276 - DNA, 15 bp, Homo sapiens
cgtgcccagctcact

SEQ ID NO: 50277 - DNA, 15 bp, Homo sapiens
gtgcccagctcactg

SEQ ID NO: 50278 - DNA, 15 bp, Homo sapiens
tgcccagctcactgt

SEQ ID NO: 50279 - DNA, 15 bp, Homo sapiens
gcccagctcactgtg

SEQ ID NO: 50280 - DNA, 15 bp, Homo sapiens
cccagctcactgtgc

SEQ ID NO: 50281 - DNA, 15 bp, Homo sapiens
ccagctcactgtgcg

SEQ ID NO: 50282 - DNA, 15 bp, Homo sapiens
cagctcactgtgcgt

SEQ ID NO: 50283 - DNA, 15 bp, Homo sapiens
agctcactgtgcgtg

SEQ ID NO: 50284 - DNA, 15 bp, Homo sapiens
gctcactgtgcgtgc

SEQ ID NO: 50285 - DNA, 15 bp, Homo sapiens
ctcactgtgcgtgct

SEQ ID NO: 50286 - DNA, 15 bp, Homo sapiens
tcactgtgcgtgctg

SEQ ID NO: 50287 - DNA, 15 bp, Homo sapiens
cactgtgcgtgctga

SEQ ID NO: 50288 - DNA, 15 bp, Homo sapiens
actgtgcgtgctgaa

SEQ ID NO: 50289 - DNA, 15 bp, Homo sapiens
ctgtgcgtgctgaac

SEQ ID NO: 50290 - DNA, 15 bp, Homo sapiens
tgtgcgtgctgaact

SEQ ID NO: 50291 - DNA, 15 bp, Homo sapiens
gtgcgtgctgaacta

SEQ ID NO: 50292 - DNA, 15 bp, Homo sapiens
tgcgtgctgaactac

SEQ ID NO: 50293 - DNA, 15 bp, Homo sapiens
gcgtgctgaactaca

SEQ ID NO: 50294 - DNA, 15 bp, Homo sapiens
cgtgctgaactacaa

SEQ ID NO: 50295 - DNA, 15 bp, Homo sapiens
gtgctgaactacaaa

SEQ ID NO: 50296 - DNA, 15 bp, Homo sapiens
tgctgaactacaaac

SEQ ID NO: 50297 - DNA, 15 bp, Homo sapiens
gctgaactacaaacc

SEQ ID NO: 50298 - DNA, 15 bp, Homo sapiens
ctgaactacaaacca

SEQ ID NO: 50299 - DNA, 15 bp, Homo sapiens
tgaactacaaaccag

SEQ ID NO: 50300 - DNA, 15 bp, Homo sapiens
gaactacaaaccagt

SEQ ID NO: 50301 - DNA, 15 bp, Homo sapiens
aactacaaaccagtg

SEQ ID NO: 50302 - DNA, 15 bp, Homo sapiens
actacaaaccagtgc

SEQ ID NO: 50303 - DNA, 15 bp, Homo sapiens
ctacaaaccagtgct

SEQ ID NO: 50304 - DNA, 15 bp, Homo sapiens
tacaaaccagtgcta

SEQ ID NO: 50305 - DNA, 15 bp, Homo sapiens
acaaaccagtgctat

SEQ ID NO: 50306 - DNA, 15 bp, Homo sapiens
caaaccagtgctatt

SEQ ID NO: 50307 - DNA, 15 bp, Homo sapiens
aaaccagtgctattc

SEQ ID NO: 50308 - DNA, 15 bp, Homo sapiens
aaccagtgctattca

SEQ ID NO: 50309 - DNA, 15 bp, Homo sapiens
accagtgctattcat

SEQ ID NO: 50310 - DNA, 15 bp, Homo sapiens
ccagtgctattcata

SEQ ID NO: 50311 - DNA, 15 bp, Homo sapiens
cagtgctattcatat

SEQ ID NO: 50312 - DNA, 15 bp, Homo sapiens
agtgctattcatata

SEQ ID NO: 50313 - DNA, 15 bp, Homo sapiens
gtgctattcatataa

SEQ ID NO: 50314 - DNA, 15 bp, Homo sapiens
tgctattcatataag

SEQ ID NO: 50315 - DNA, 15 bp, Homo sapiens
gctattcatataaga

SEQ ID NO: 50316 - DNA, 15 bp, Homo sapiens
ctattcatataagaa

SEQ ID NO: 50317 - DNA, 15 bp, Homo sapiens
tattcatataagaaa

SEQ ID NO: 50318 - DNA, 15 bp, Homo sapiens
attcatataagaaat

SEQ ID NO: 50319 - DNA, 15 bp, Homo sapiens
ttcatataagaaatg

SEQ ID NO: 50320 - DNA, 15 bp, Homo sapiens
tcatataagaaatga

SEQ ID NO: 50321 - DNA, 15 bp, Homo sapiens
catataagaaatgat

SEQ ID NO: 50322 - DNA, 15 bp, Homo sapiens
atataagaaatgata

SEQ ID NO: 50323 - DNA, 15 bp, Homo sapiens
tataagaaatgatat

SEQ ID NO: 50324 - DNA, 15 bp, Homo sapiens
ataagaaatgatatc

SEQ ID NO: 50325 - DNA, 15 bp, Homo sapiens
taagaaatgatatca

SEQ ID NO: 50326 - DNA, 15 bp, Homo sapiens
aagaaatgatatcaa

SEQ ID NO: 50327 - DNA, 15 bp, Homo sapiens
agaaatgatatcaat

SEQ ID NO: 50328 - DNA, 15 bp, Homo sapiens
gaaatgatatcaatc

SEQ ID NO: 50329 - DNA, 15 bp, Homo sapiens
aaatgatatcaatca

SEQ ID NO: 50330 - DNA, 15 bp, Homo sapiens
aatgatatcaatcat

SEQ ID NO: 50331 - DNA, 15 bp, Homo sapiens
atgatatcaatcatc

SEQ ID NO: 50332 - DNA, 15 bp, Homo sapiens
tgatatcaatcatct

SEQ ID NO: 50333 - DNA, 15 bp, Homo sapiens
gatatcaatcatcta

SEQ ID NO: 50334 - DNA, 15 bp, Homo sapiens
atatcaatcatctac

SEQ ID NO: 50335 - DNA, 15 bp, Homo sapiens
tatcaatcatctaca

SEQ ID NO: 50336 - DNA, 15 bp, Homo sapiens
atcaatcatctacat

SEQ ID NO: 50337 - DNA, 15 bp, Homo sapiens
tcaatcatctacatt

SEQ ID NO: 50338 - DNA, 15 bp, Homo sapiens
caatcatctacattt

SEQ ID NO: 50339 - DNA, 15 bp, Homo sapiens
aatcatctacatttt

SEQ ID NO: 50340 - DNA, 15 bp, Homo sapiens
atcatctacattttg

SEQ ID NO: 50341 - DNA, 15 bp, Homo sapiens
tcatctacattttga

SEQ ID NO: 50342 - DNA, 15 bp, Homo sapiens
catctacattttgac

SEQ ID NO: 50343 - DNA, 15 bp, Homo sapiens
atctacattttgact

SEQ ID NO: 50344 - DNA, 15 bp, Homo sapiens
tctacattttgacta

SEQ ID NO: 50345 - DNA, 15 bp, Homo sapiens
ctacattttgactat

SEQ ID NO: 50346 - DNA, 15 bp, Homo sapiens
tacattttgactatt

SEQ ID NO: 50347 - DNA, 15 bp, Homo sapiens
acattttgactattg

SEQ ID NO: 50348 - DNA, 15 bp, Homo sapiens
cattttgactattga

SEQ ID NO: 50349 - DNA, 15 bp, Homo sapiens
attttgactattgaa

SEQ ID NO: 50350 - DNA, 15 bp, Homo sapiens
ttttgactattgaaa

SEQ ID NO: 50351 - DNA, 15 bp, Homo sapiens
tttgactattgaaaa

SEQ ID NO: 50352 - DNA, 15 bp, Homo sapiens
ttgactattgaaaag

SEQ ID NO: 50353 - DNA, 15 bp, Homo sapiens
tgactattgaaaagc

SEQ ID NO: 50354 - DNA, 15 bp, Homo sapiens
gactattgaaaagct

SEQ ID NO: 50355 - DNA, 15 bp, Homo sapiens
actattgaaaagctg

SEQ ID NO: 50356 - DNA, 15 bp, Homo sapiens
ctattgaaaagctgg

SEQ ID NO: 50357 - DNA, 15 bp, Homo sapiens
tattgaaaagctggg

SEQ ID NO: 50358 - DNA, 15 bp, Homo sapiens
attgaaaagctggga

SEQ ID NO: 50359 - DNA, 15 bp, Homo sapiens
ttgaaaagctgggac

SEQ ID NO: 50360 - DNA, 15 bp, Homo sapiens
tgaaaagctgggact

SEQ ID NO: 50361 - DNA, 15 bp, Homo sapiens
gaaaagctgggactc

SEQ ID NO: 50362 - DNA, 15 bp, Homo sapiens
aaaagctgggactct

SEQ ID NO: 50363 - DNA, 15 bp, Homo sapiens
aaagctgggactctt

SEQ ID NO: 50364 - DNA, 15 bp, Homo sapiens
aagctgggactctta

SEQ ID NO: 50365 - DNA, 15 bp, Homo sapiens
agctgggactcttaa

SEQ ID NO: 50366 - DNA, 15 bp, Homo sapiens
gctgggactcttaaa

SEQ ID NO: 50367 - DNA, 15 bp, Homo sapiens
ctgggactcttaaag

SEQ ID NO: 50368 - DNA, 15 bp, Homo sapiens
tgggactcttaaaga

SEQ ID NO: 50369 - DNA, 15 bp, Homo sapiens
gggactcttaaagat

SEQ ID NO: 50370 - DNA, 15 bp, Homo sapiens
ggactcttaaagatt

SEQ ID NO: 50371 - DNA, 15 bp, Homo sapiens
gactcttaaagattc

SEQ ID NO: 50372 - DNA, 15 bp, Homo sapiens
actcttaaagattcc

SEQ ID NO: 50373 - DNA, 15 bp, Homo sapiens
ctcttaaagattcca

SEQ ID NO: 50374 - DNA, 15 bp, Homo sapiens
tcttaaagattccag

SEQ ID NO: 50375 - DNA, 15 bp, Homo sapiens
cttaaagattccagg

SEQ ID NO: 50376 - DNA, 15 bp, Homo sapiens
ttaaagattccagga

SEQ ID NO: 50377 - DNA, 15 bp, Homo sapiens
taaagattccaggaa

SEQ ID NO: 50378 - DNA, 15 bp, Homo sapiens
aaagattccaggaaa

SEQ ID NO: 50379 - DNA, 15 bp, Homo sapiens
aagattccaggaaaa

SEQ ID NO: 50380 - DNA, 15 bp, Homo sapiens
agattccaggaaaaa

SEQ ID NO: 50381 - DNA, 15 bp, Homo sapiens
gattccaggaaaaag

SEQ ID NO: 50382 - DNA, 15 bp, Homo sapiens
attccaggaaaaagg

SEQ ID NO: 50383 - DNA, 15 bp, Homo sapiens
ttccaggaaaaaggg

SEQ ID NO: 50384 - DNA, 15 bp, Homo sapiens
tccaggaaaaaggga

SEQ ID NO: 50385 - DNA, 15 bp, Homo sapiens
ccaggaaaaagggaa

SEQ ID NO: 50386 - DNA, 15 bp, Homo sapiens
caggaaaaagggaat

SEQ ID NO: 50387 - DNA, 15 bp, Homo sapiens
aggaaaaagggaata

SEQ ID NO: 50388 - DNA, 15 bp, Homo sapiens
ggaaaaagggaatag

SEQ ID NO: 50389 - DNA, 15 bp, Homo sapiens
gaaaaagggaatagc

SEQ ID NO: 50390 - DNA, 15 bp, Homo sapiens
aaaaagggaatagct

SEQ ID NO: 50391 - DNA, 15 bp, Homo sapiens
aaaagggaatagctt

SEQ ID NO: 50392 - DNA, 15 bp, Homo sapiens
aaagggaatagctta

SEQ ID NO: 50393 - DNA, 15 bp, Homo sapiens
aagggaatagcttac

SEQ ID NO: 50394 - DNA, 15 bp, Homo sapiens
agggaatagcttaca

SEQ ID NO: 50395 - DNA, 15 bp, Homo sapiens
gggaatagcttacat

SEQ ID NO: 50396 - DNA, 15 bp, Homo sapiens
ggaatagcttacatt

SEQ ID NO: 50397 - DNA, 15 bp, Homo sapiens
gaatagcttacattt

SEQ ID NO: 50398 - DNA, 15 bp, Homo sapiens
aatagcttacatttt

SEQ ID NO: 50399 - DNA, 15 bp, Homo sapiens
atagcttacattttc

SEQ ID NO: 50400 - DNA, 15 bp, Homo sapiens
tagcttacattttca

SEQ ID NO: 50401 - DNA, 15 bp, Homo sapiens
agcttacattttcat

SEQ ID NO: 50402 - DNA, 15 bp, Homo sapiens
gcttacattttcatg

SEQ ID NO: 50403 - DNA, 15 bp, Homo sapiens
cttacattttcatgg

SEQ ID NO: 50404 - DNA, 15 bp, Homo sapiens
ttacattttcatggc

SEQ ID NO: 50405 - DNA, 15 bp, Homo sapiens
tacattttcatggcg

SEQ ID NO: 50406 - DNA, 15 bp, Homo sapiens
acattttcatggcgc

SEQ ID NO: 50407 - DNA, 15 bp, Homo sapiens
cattttcatggcgcc

SEQ ID NO: 50408 - DNA, 15 bp, Homo sapiens
attttcatggcgccc

SEQ ID NO: 50409 - DNA, 15 bp, Homo sapiens
ttttcatggcgcccc

SEQ ID NO: 50410 - DNA, 15 bp, Homo sapiens
tttcatggcgcccct

SEQ ID NO: 50411 - DNA, 15 bp, Homo sapiens
ttcatggcgcccctt

SEQ ID NO: 50412 - DNA, 15 bp, Homo sapiens
tcatggcgccccttt

SEQ ID NO: 50413 - DNA, 15 bp, Homo sapiens
catggcgcccctttt

SEQ ID NO: 50414 - DNA, 15 bp, Homo sapiens
atggcgcccctttta

SEQ ID NO: 50415 - DNA, 15 bp, Homo sapiens
tggcgccccttttaa

SEQ ID NO: 50416 - DNA, 15 bp, Homo sapiens
ggcgccccttttaaa

SEQ ID NO: 50417 - DNA, 15 bp, Homo sapiens
gcgccccttttaaac

SEQ ID NO: 50418 - DNA, 15 bp, Homo sapiens
cgccccttttaaaca

SEQ ID NO: 50419 - DNA, 15 bp, Homo sapiens
gccccttttaaacag

SEQ ID NO: 50420 - DNA, 15 bp, Homo sapiens
ccccttttaaacagg

SEQ ID NO: 50421 - DNA, 15 bp, Homo sapiens
cccttttaaacagga

SEQ ID NO: 50422 - DNA, 15 bp, Homo sapiens
ccttttaaacaggaa

SEQ ID NO: 50423 - DNA, 15 bp, Homo sapiens
cttttaaacaggaaa

SEQ ID NO: 50424 - DNA, 15 bp, Homo sapiens
ttttaaacaggaaac

SEQ ID NO: 50425 - DNA, 15 bp, Homo sapiens
tttaaacaggaaacc

SEQ ID NO: 50426 - DNA, 15 bp, Homo sapiens
ttaaacaggaaaccc

SEQ ID NO: 50427 - DNA, 15 bp, Homo sapiens
taaacaggaaaccca

SEQ ID NO: 50428 - DNA, 15 bp, Homo sapiens
aaacaggaaacccac

SEQ ID NO: 50429 - DNA, 15 bp, Homo sapiens
aacaggaaacccacg

SEQ ID NO: 50430 - DNA, 15 bp, Homo sapiens
acaggaaacccacgg

SEQ ID NO: 50431 - DNA, 15 bp, Homo sapiens
caggaaacccacgga

SEQ ID NO: 50432 - DNA, 15 bp, Homo sapiens
aggaaacccacggac

SEQ ID NO: 50433 - DNA, 15 bp, Homo sapiens
ggaaacccacggact

SEQ ID NO: 50434 - DNA, 15 bp, Homo sapiens
gaaacccacggactt

SEQ ID NO: 50435 - DNA, 15 bp, Homo sapiens
aaacccacggacttt

SEQ ID NO: 50436 - DNA, 15 bp, Homo sapiens
aacccacggactttg

SEQ ID NO: 50437 - DNA, 15 bp, Homo sapiens
acccacggactttga

SEQ ID NO: 50438 - DNA, 15 bp, Homo sapiens
cccacggactttgag

SEQ ID NO: 50439 - DNA, 15 bp, Homo sapiens
ccacggactttgagc

SEQ ID NO: 50440 - DNA, 15 bp, Homo sapiens
cacggactttgagcc

SEQ ID NO: 50441 - DNA, 15 bp, Homo sapiens
acggactttgagcca

SEQ ID NO: 50442 - DNA, 15 bp, Homo sapiens
cggactttgagccag

SEQ ID NO: 50443 - DNA, 15 bp, Homo sapiens
ggactttgagccagg

SEQ ID NO: 50444 - DNA, 15 bp, Homo sapiens
gactttgagccagga

SEQ ID NO: 50445 - DNA, 15 bp, Homo sapiens
actttgagccaggat

SEQ ID NO: 50446 - DNA, 15 bp, Homo sapiens
ctttgagccaggatt

SEQ ID NO: 50447 - DNA, 15 bp, Homo sapiens
tttgagccaggattt

SEQ ID NO: 50448 - DNA, 15 bp, Homo sapiens
ttgagccaggatttt

SEQ ID NO: 50449 - DNA, 15 bp, Homo sapiens
tgagccaggatttta

SEQ ID NO: 50450 - DNA, 15 bp, Homo sapiens
gagccaggattttag

SEQ ID NO: 50451 - DNA, 15 bp, Homo sapiens
agccaggattttaga

SEQ ID NO: 50452 - DNA, 15 bp, Homo sapiens
gccaggattttagaa

SEQ ID NO: 50453 - DNA, 15 bp, Homo sapiens
ccaggattttagaaa

SEQ ID NO: 50454 - DNA, 15 bp, Homo sapiens
caggattttagaaat

SEQ ID NO: 50455 - DNA, 15 bp, Homo sapiens
aggattttagaaatt

SEQ ID NO: 50456 - DNA, 15 bp, Homo sapiens
ggattttagaaattt

SEQ ID NO: 50457 - DNA, 15 bp, Homo sapiens
gattttagaaatttg

SEQ ID NO: 50458 - DNA, 15 bp, Homo sapiens
attttagaaatttgc

SEQ ID NO: 50459 - DNA, 15 bp, Homo sapiens
ttttagaaatttgca

SEQ ID NO: 50460 - DNA, 15 bp, Homo sapiens
tttagaaatttgcat

SEQ ID NO: 50461 - DNA, 15 bp, Homo sapiens
ttagaaatttgcatt

SEQ ID NO: 50462 - DNA, 15 bp, Homo sapiens
tagaaatttgcattt

SEQ ID NO: 50463 - DNA, 15 bp, Homo sapiens
agaaatttgcatttc

SEQ ID NO: 50464 - DNA, 15 bp, Homo sapiens
gaaatttgcatttct

SEQ ID NO: 50465 - DNA, 15 bp, Homo sapiens
aaatttgcatttctt

SEQ ID NO: 50466 - DNA, 15 bp, Homo sapiens
aatttgcatttcttt

SEQ ID NO: 50467 - DNA, 15 bp, Homo sapiens
atttgcatttctttt

SEQ ID NO: 50468 - DNA, 15 bp, Homo sapiens
tttgcatttcttttt

SEQ ID NO: 50469 - DNA, 15 bp, Homo sapiens
ttgcatttctttttt

SEQ ID NO: 50470 - DNA, 15 bp, Homo sapiens
tgcatttcttttttt

SEQ ID NO: 50471 - DNA, 15 bp, Homo sapiens
gcatttcttttttta

SEQ ID NO: 50472 - DNA, 15 bp, Homo sapiens
catttctttttttac

SEQ ID NO: 50473 - DNA, 15 bp, Homo sapiens
atttctttttttaca

SEQ ID NO: 50474 - DNA, 15 bp, Homo sapiens
tttctttttttacag

SEQ ID NO: 50475 - DNA, 15 bp, Homo sapiens
ttctttttttacagg

SEQ ID NO: 50476 - DNA, 15 bp, Homo sapiens
tctttttttacagga

SEQ ID NO: 50477 - DNA, 15 bp, Homo sapiens
ctttttttacaggat

SEQ ID NO: 50478 - DNA, 15 bp, Homo sapiens
tttttttacaggatt

SEQ ID NO: 50479 - DNA, 15 bp, Homo sapiens
ttttttacaggattt

SEQ ID NO: 50480 - DNA, 15 bp, Homo sapiens
tttttacaggatttt

SEQ ID NO: 50481 - DNA, 15 bp, Homo sapiens
ttttacaggattttc

SEQ ID NO: 50482 - DNA, 15 bp, Homo sapiens
tttacaggattttcc

SEQ ID NO: 50483 - DNA, 15 bp, Homo sapiens
ttacaggattttccc

SEQ ID NO: 50484 - DNA, 15 bp, Homo sapiens
tacaggattttccct

SEQ ID NO: 50485 - DNA, 15 bp, Homo sapiens
acaggattttccctc

SEQ ID NO: 50486 - DNA, 15 bp, Homo sapiens
caggattttccctcc

SEQ ID NO: 50487 - DNA, 15 bp, Homo sapiens
aggattttccctcct

SEQ ID NO: 50488 - DNA, 15 bp, Homo sapiens
ggattttccctcctg

SEQ ID NO: 50489 - DNA, 15 bp, Homo sapiens
gattttccctcctgg

SEQ ID NO: 50490 - DNA, 15 bp, Homo sapiens
attttccctcctggt

SEQ ID NO: 50491 - DNA, 15 bp, Homo sapiens
ttttccctcctggtg

SEQ ID NO: 50492 - DNA, 15 bp, Homo sapiens
tttccctcctggtga

SEQ ID NO: 50493 - DNA, 15 bp, Homo sapiens
ttccctcctggtgag

SEQ ID NO: 50494 - DNA, 15 bp, Homo sapiens
tccctcctggtgagt

SEQ ID NO: 50495 - DNA, 15 bp, Homo sapiens
ccctcctggtgagtc

SEQ ID NO: 50496 - DNA, 15 bp, Homo sapiens
cctcctggtgagtca

SEQ ID NO: 50497 - DNA, 15 bp, Homo sapiens
ctcctggtgagtcaa

SEQ ID NO: 50498 - DNA, 15 bp, Homo sapiens
tcctggtgagtcaaa

SEQ ID NO: 50499 - DNA, 15 bp, Homo sapiens
cctggtgagtcaaaa

SEQ ID NO: 50500 - DNA, 15 bp, Homo sapiens
ctggtgagtcaaaat

SEQ ID NO: 50501 - DNA, 15 bp, Homo sapiens
tggtgagtcaaaatg

SEQ ID NO: 50502 - DNA, 15 bp, Homo sapiens
ggtgagtcaaaatga

SEQ ID NO: 50503 - DNA, 15 bp, Homo sapiens
gtgagtcaaaatgaa

SEQ ID NO: 50504 - DNA, 15 bp, Homo sapiens
tgagtcaaaatgaac

SEQ ID NO: 50505 - DNA, 15 bp, Homo sapiens
gagtcaaaatgaaca

SEQ ID NO: 50506 - DNA, 15 bp, Homo sapiens
agtcaaaatgaacaa

SEQ ID NO: 50507 - DNA, 15 bp, Homo sapiens
gtcaaaatgaacaag

SEQ ID NO: 50508 - DNA, 15 bp, Homo sapiens
tcaaaatgaacaaga

SEQ ID NO: 50509 - DNA, 15 bp, Homo sapiens
caaaatgaacaagaa

SEQ ID NO: 50510 - DNA, 15 bp, Homo sapiens
aaaatgaacaagaaa

SEQ ID NO: 50511 - DNA, 15 bp, Homo sapiens
aaatgaacaagaaat

SEQ ID NO: 50512 - DNA, 15 bp, Homo sapiens
aatgaacaagaaata

SEQ ID NO: 50513 - DNA, 15 bp, Homo sapiens
atgaacaagaaatac

SEQ ID NO: 50514 - DNA, 15 bp, Homo sapiens
tgaacaagaaatacc

SEQ ID NO: 50515 - DNA, 15 bp, Homo sapiens
gaacaagaaataccc

SEQ ID NO: 50516 - DNA, 15 bp, Homo sapiens
aacaagaaatacccc

SEQ ID NO: 50517 - DNA, 15 bp, Homo sapiens
acaagaaatacccca

SEQ ID NO: 50518 - DNA, 15 bp, Homo sapiens
caagaaataccccag

SEQ ID NO: 50519 - DNA, 15 bp, Homo sapiens
aagaaataccccagg

SEQ ID NO: 50520 - DNA, 15 bp, Homo sapiens
agaaataccccagga

SEQ ID NO: 50521 - DNA, 15 bp, Homo sapiens
gaaataccccaggac

SEQ ID NO: 50522 - DNA, 15 bp, Homo sapiens
aaataccccaggacc

SEQ ID NO: 50523 - DNA, 15 bp, Homo sapiens
aataccccaggacct

SEQ ID NO: 50524 - DNA, 15 bp, Homo sapiens
ataccccaggacctc

SEQ ID NO: 50525 - DNA, 15 bp, Homo sapiens
taccccaggacctcc

SEQ ID NO: 50526 - DNA, 15 bp, Homo sapiens
accccaggacctccc

SEQ ID NO: 50527 - DNA, 15 bp, Homo sapiens
ccccaggacctccct

SEQ ID NO: 50528 - DNA, 15 bp, Homo sapiens
cccaggacctccctt

SEQ ID NO: 50529 - DNA, 15 bp, Homo sapiens
ccaggacctcccttc

SEQ ID NO: 50530 - DNA, 15 bp, Homo sapiens
caggacctcccttcc

SEQ ID NO: 50531 - DNA, 15 bp, Homo sapiens
aggacctcccttccc

SEQ ID NO: 50532 - DNA, 15 bp, Homo sapiens
ggacctcccttccct

SEQ ID NO: 50533 - DNA, 15 bp, Homo sapiens
gacctcccttccctc

SEQ ID NO: 50534 - DNA, 15 bp, Homo sapiens
acctcccttccctcc

SEQ ID NO: 50535 - DNA, 15 bp, Homo sapiens
cctcccttccctcct

SEQ ID NO: 50536 - DNA, 15 bp, Homo sapiens
ctcccttccctcctt

SEQ ID NO: 50537 - DNA, 15 bp, Homo sapiens
tcccttccctccttg

SEQ ID NO: 50538 - DNA, 15 bp, Homo sapiens
cccttccctccttgg

SEQ ID NO: 50539 - DNA, 15 bp, Homo sapiens
ccttccctccttggc

SEQ ID NO: 50540 - DNA, 15 bp, Homo sapiens
cttccctccttggcc

SEQ ID NO: 50541 - DNA, 15 bp, Homo sapiens
ttccctccttggcca

SEQ ID NO: 50542 - DNA, 15 bp, Homo sapiens
tccctccttggccat

SEQ ID NO: 50543 - DNA, 15 bp, Homo sapiens
ccctccttggccatt

SEQ ID NO: 50544 - DNA, 15 bp, Homo sapiens
cctccttggccatta

SEQ ID NO: 50545 - DNA, 15 bp, Homo sapiens
ctccttggccattaa

SEQ ID NO: 50546 - DNA, 15 bp, Homo sapiens
tccttggccattaat

SEQ ID NO: 50547 - DNA, 15 bp, Homo sapiens
ccttggccattaatg

SEQ ID NO: 50548 - DNA, 15 bp, Homo sapiens
cttggccattaatga

SEQ ID NO: 50549 - DNA, 15 bp, Homo sapiens
ttggccattaatgag

SEQ ID NO: 50550 - DNA, 15 bp, Homo sapiens
tggccattaatgaga

SEQ ID NO: 50551 - DNA, 15 bp, Homo sapiens
ggccattaatgagat

SEQ ID NO: 50552 - DNA, 15 bp, Homo sapiens
gccattaatgagatg

SEQ ID NO: 50553 - DNA, 15 bp, Homo sapiens
ccattaatgagatga

SEQ ID NO: 50554 - DNA, 15 bp, Homo sapiens
cattaatgagatgaa

SEQ ID NO: 50555 - DNA, 15 bp, Homo sapiens
attaatgagatgaag

SEQ ID NO: 50556 - DNA, 15 bp, Homo sapiens
ttaatgagatgaagg

SEQ ID NO: 50557 - DNA, 15 bp, Homo sapiens
taatgagatgaaggc

SEQ ID NO: 50558 - DNA, 15 bp, Homo sapiens
aatgagatgaaggca

SEQ ID NO: 50559 - DNA, 15 bp, Homo sapiens
atgagatgaaggcaa

SEQ ID NO: 50560 - DNA, 15 bp, Homo sapiens
tgagatgaaggcaat

SEQ ID NO: 50561 - DNA, 15 bp, Homo sapiens
gagatgaaggcaatt

SEQ ID NO: 50562 - DNA, 15 bp, Homo sapiens
agatgaaggcaatta

SEQ ID NO: 50563 - DNA, 15 bp, Homo sapiens
gatgaaggcaattaa

SEQ ID NO: 50564 - DNA, 15 bp, Homo sapiens
atgaaggcaattaac

SEQ ID NO: 50565 - DNA, 15 bp, Homo sapiens
tgaaggcaattaact

SEQ ID NO: 50566 - DNA, 15 bp, Homo sapiens
gaaggcaattaactc

SEQ ID NO: 50567 - DNA, 15 bp, Homo sapiens
aaggcaattaactca

SEQ ID NO: 50568 - DNA, 15 bp, Homo sapiens
aggcaattaactcac

SEQ ID NO: 50569 - DNA, 15 bp, Homo sapiens
ggcaattaactcaca

SEQ ID NO: 50570 - DNA, 15 bp, Homo sapiens
gcaattaactcacat

SEQ ID NO: 50571 - DNA, 15 bp, Homo sapiens
caattaactcacata

SEQ ID NO: 50572 - DNA, 15 bp, Homo sapiens
aattaactcacatag

SEQ ID NO: 50573 - DNA, 15 bp, Homo sapiens
attaactcacatagt

SEQ ID NO: 50574 - DNA, 15 bp, Homo sapiens
ttaactcacatagta

SEQ ID NO: 50575 - DNA, 15 bp, Homo sapiens
taactcacatagtat

SEQ ID NO: 50576 - DNA, 15 bp, Homo sapiens
aactcacatagtata

SEQ ID NO: 50577 - DNA, 15 bp, Homo sapiens
actcacatagtataa

SEQ ID NO: 50578 - DNA, 15 bp, Homo sapiens
ctcacatagtataaa

SEQ ID NO: 50579 - DNA, 15 bp, Homo sapiens
tcacatagtataaat

SEQ ID NO: 50580 - DNA, 15 bp, Homo sapiens
cacatagtataaatg

SEQ ID NO: 50581 - DNA, 15 bp, Homo sapiens
acatagtataaatga

SEQ ID NO: 50582 - DNA, 15 bp, Homo sapiens
catagtataaatgaa

SEQ ID NO: 50583 - DNA, 15 bp, Homo sapiens
atagtataaatgaat

SEQ ID NO: 50584 - DNA, 15 bp, Homo sapiens
tagtataaatgaatc

SEQ ID NO: 50585 - DNA, 15 bp, Homo sapiens
agtataaatgaatca

SEQ ID NO: 50586 - DNA, 15 bp, Homo sapiens
gtataaatgaatcat

SEQ ID NO: 50587 - DNA, 15 bp, Homo sapiens
tataaatgaatcatt

SEQ ID NO: 50588 - DNA, 15 bp, Homo sapiens
ataaatgaatcattt

SEQ ID NO: 50589 - DNA, 15 bp, Homo sapiens
taaatgaatcatttg

SEQ ID NO: 50590 - DNA, 15 bp, Homo sapiens
aaatgaatcatttga

SEQ ID NO: 50591 - DNA, 15 bp, Homo sapiens
aatgaatcatttgag

SEQ ID NO: 50592 - DNA, 15 bp, Homo sapiens
atgaatcatttgagg

SEQ ID NO: 50593 - DNA, 15 bp, Homo sapiens
tgaatcatttgaggt

SEQ ID NO: 50594 - DNA, 15 bp, Homo sapiens
gaatcatttgaggtg

SEQ ID NO: 50595 - DNA, 15 bp, Homo sapiens
aatcatttgaggtga

SEQ ID NO: 50596 - DNA, 15 bp, Homo sapiens
atcatttgaggtgat

SEQ ID NO: 50597 - DNA, 15 bp, Homo sapiens
tcatttgaggtgatg

SEQ ID NO: 50598 - DNA, 15 bp, Homo sapiens
catttgaggtgatga

SEQ ID NO: 50599 - DNA, 15 bp, Homo sapiens
atttgaggtgatgac

SEQ ID NO: 50600 - DNA, 15 bp, Homo sapiens
tttgaggtgatgact

SEQ ID NO: 50601 - DNA, 15 bp, Homo sapiens
ttgaggtgatgactg

SEQ ID NO: 50602 - DNA, 15 bp, Homo sapiens
tgaggtgatgactgc

SEQ ID NO: 50603 - DNA, 15 bp, Homo sapiens
gaggtgatgactgca

SEQ ID NO: 50604 - DNA, 15 bp, Homo sapiens
aggtgatgactgcat

SEQ ID NO: 50605 - DNA, 15 bp, Homo sapiens
ggtgatgactgcatt

SEQ ID NO: 50606 - DNA, 15 bp, Homo sapiens
gtgatgactgcattt

SEQ ID NO: 50607 - DNA, 15 bp, Homo sapiens
tgatgactgcatttt

SEQ ID NO: 50608 - DNA, 15 bp, Homo sapiens
gatgactgcatttta

SEQ ID NO: 50609 - DNA, 15 bp, Homo sapiens
atgactgcattttag

SEQ ID NO: 50610 - DNA, 15 bp, Homo sapiens
tgactgcattttagg

SEQ ID NO: 50611 - DNA, 15 bp, Homo sapiens
gactgcattttaggc

SEQ ID NO: 50612 - DNA, 15 bp, Homo sapiens
actgcattttaggca

SEQ ID NO: 50613 - DNA, 15 bp, Homo sapiens
ctgcattttaggcaa

SEQ ID NO: 50614 - DNA, 15 bp, Homo sapiens
tgcattttaggcaaa

SEQ ID NO: 50615 - DNA, 15 bp, Homo sapiens
gcattttaggcaaat

SEQ ID NO: 50616 - DNA, 15 bp, Homo sapiens
cattttaggcaaatg

SEQ ID NO: 50617 - DNA, 15 bp, Homo sapiens
attttaggcaaatga

SEQ ID NO: 50618 - DNA, 15 bp, Homo sapiens
ttttaggcaaatgat

SEQ ID NO: 50619 - DNA, 15 bp, Homo sapiens
tttaggcaaatgatg

SEQ ID NO: 50620 - DNA, 15 bp, Homo sapiens
ttaggcaaatgatga

SEQ ID NO: 50621 - DNA, 15 bp, Homo sapiens
taggcaaatgatgac

SEQ ID NO: 50622 - DNA, 15 bp, Homo sapiens
aggcaaatgatgact

SEQ ID NO: 50623 - DNA, 15 bp, Homo sapiens
ggcaaatgatgactt

SEQ ID NO: 50624 - DNA, 15 bp, Homo sapiens
gcaaatgatgacttt

SEQ ID NO: 50625 - DNA, 15 bp, Homo sapiens
caaatgatgactttc

SEQ ID NO: 50626 - DNA, 15 bp, Homo sapiens
aaatgatgactttct

SEQ ID NO: 50627 - DNA, 15 bp, Homo sapiens
aatgatgactttctt

SEQ ID NO: 50628 - DNA, 15 bp, Homo sapiens
atgatgactttcttg

SEQ ID NO: 50629 - DNA, 15 bp, Homo sapiens
tgatgactttcttgg

SEQ ID NO: 50630 - DNA, 15 bp, Homo sapiens
gatgactttcttggt

SEQ ID NO: 50631 - DNA, 15 bp, Homo sapiens
atgactttcttggtt

SEQ ID NO: 50632 - DNA, 15 bp, Homo sapiens
tgactttcttggttc

SEQ ID NO: 50633 - DNA, 15 bp, Homo sapiens
gactttcttggttcc

SEQ ID NO: 50634 - DNA, 15 bp, Homo sapiens
actttcttggttcca

SEQ ID NO: 50635 - DNA, 15 bp, Homo sapiens
ctttcttggttccat

SEQ ID NO: 50636 - DNA, 15 bp, Homo sapiens
tttcttggttccatt

SEQ ID NO: 50637 - DNA, 15 bp, Homo sapiens
ttcttggttccattg

SEQ ID NO: 50638 - DNA, 15 bp, Homo sapiens
tcttggttccattgg

SEQ ID NO: 50639 - DNA, 15 bp, Homo sapiens
cttggttccattggt

SEQ ID NO: 50640 - DNA, 15 bp, Homo sapiens
ttggttccattggtt

SEQ ID NO: 50641 - DNA, 15 bp, Homo sapiens
tggttccattggttt

SEQ ID NO: 50642 - DNA, 15 bp, Homo sapiens
ggttccattggtttg

SEQ ID NO: 50643 - DNA, 15 bp, Homo sapiens
gttccattggtttgc

SEQ ID NO: 50644 - DNA, 15 bp, Homo sapiens
ttccattggtttgca

SEQ ID NO: 50645 - DNA, 15 bp, Homo sapiens
tccattggtttgcaa

SEQ ID NO: 50646 - DNA, 15 bp, Homo sapiens
ccattggtttgcaag

SEQ ID NO: 50647 - DNA, 15 bp, Homo sapiens
cattggtttgcaagt

SEQ ID NO: 50648 - DNA, 15 bp, Homo sapiens
attggtttgcaagta

SEQ ID NO: 50649 - DNA, 15 bp, Homo sapiens
ttggtttgcaagtaa

SEQ ID NO: 50650 - DNA, 15 bp, Homo sapiens
tggtttgcaagtaaa

SEQ ID NO: 50651 - DNA, 15 bp, Homo sapiens
ggtttgcaagtaaaa

SEQ ID NO: 50652 - DNA, 15 bp, Homo sapiens
gtttgcaagtaaaag

SEQ ID NO: 50653 - DNA, 15 bp, Homo sapiens
tttgcaagtaaaagt

SEQ ID NO: 50654 - DNA, 15 bp, Homo sapiens
ttgcaagtaaaagtt

SEQ ID NO: 50655 - DNA, 15 bp, Homo sapiens
tgcaagtaaaagtta

SEQ ID NO: 50656 - DNA, 15 bp, Homo sapiens
gcaagtaaaagttac

SEQ ID NO: 50657 - DNA, 15 bp, Homo sapiens
caagtaaaagttaca

SEQ ID NO: 50658 - DNA, 15 bp, Homo sapiens
aagtaaaagttacac

SEQ ID NO: 50659 - DNA, 15 bp, Homo sapiens
agtaaaagttacaca

SEQ ID NO: 50660 - DNA, 15 bp, Homo sapiens
gtaaaagttacacac

SEQ ID NO: 50661 - DNA, 15 bp, Homo sapiens
taaaagttacacaca

SEQ ID NO: 50662 - DNA, 15 bp, Homo sapiens
aaaagttacacacat

SEQ ID NO: 50663 - DNA, 15 bp, Homo sapiens
aaagttacacacatt

SEQ ID NO: 50664 - DNA, 15 bp, Homo sapiens
aagttacacacattg

SEQ ID NO: 50665 - DNA, 15 bp, Homo sapiens
agttacacacattga

SEQ ID NO: 50666 - DNA, 15 bp, Homo sapiens
gttacacacattgaa

SEQ ID NO: 50667 - DNA, 15 bp, Homo sapiens
ttacacacattgaaa

SEQ ID NO: 50668 - DNA, 15 bp, Homo sapiens
tacacacattgaaaa

SEQ ID NO: 50669 - DNA, 15 bp, Homo sapiens
acacacattgaaaag

SEQ ID NO: 50670 - DNA, 15 bp, Homo sapiens
cacacattgaaaaga

SEQ ID NO: 50671 - DNA, 15 bp, Homo sapiens
acacattgaaaagac

SEQ ID NO: 50672 - DNA, 15 bp, Homo sapiens
cacattgaaaagaca

SEQ ID NO: 50673 - DNA, 15 bp, Homo sapiens
acattgaaaagacac

SEQ ID NO: 50674 - DNA, 15 bp, Homo sapiens
cattgaaaagacact

SEQ ID NO: 50675 - DNA, 15 bp, Homo sapiens
attgaaaagacactg

SEQ ID NO: 50676 - DNA, 15 bp, Homo sapiens
ttgaaaagacactga

SEQ ID NO: 50677 - DNA, 15 bp, Homo sapiens
tgaaaagacactgaa

SEQ ID NO: 50678 - DNA, 15 bp, Homo sapiens
gaaaagacactgaaa

SEQ ID NO: 50679 - DNA, 15 bp, Homo sapiens
aaaagacactgaaac

SEQ ID NO: 50680 - DNA, 15 bp, Homo sapiens
aaagacactgaaaca

SEQ ID NO: 50681 - DNA, 15 bp, Homo sapiens
aagacactgaaacag

SEQ ID NO: 50682 - DNA, 15 bp, Homo sapiens
agacactgaaacaga

SEQ ID NO: 50683 - DNA, 15 bp, Homo sapiens
gacactgaaacagat

SEQ ID NO: 50684 - DNA, 15 bp, Homo sapiens
acactgaaacagatt

SEQ ID NO: 50685 - DNA, 15 bp, Homo sapiens
cactgaaacagattt

SEQ ID NO: 50686 - DNA, 15 bp, Homo sapiens
actgaaacagatttc

SEQ ID NO: 50687 - DNA, 15 bp, Homo sapiens
ctgaaacagatttcc

SEQ ID NO: 50688 - DNA, 15 bp, Homo sapiens
tgaaacagatttcct

SEQ ID NO: 50689 - DNA, 15 bp, Homo sapiens
gaaacagatttccta

SEQ ID NO: 50690 - DNA, 15 bp, Homo sapiens
aaacagatttcctaa

SEQ ID NO: 50691 - DNA, 15 bp, Homo sapiens
aacagatttcctaaa

SEQ ID NO: 50692 - DNA, 15 bp, Homo sapiens
acagatttcctaaat

SEQ ID NO: 50693 - DNA, 15 bp, Homo sapiens
cagatttcctaaatg

SEQ ID NO: 50694 - DNA, 15 bp, Homo sapiens
agatttcctaaatgc

SEQ ID NO: 50695 - DNA, 15 bp, Homo sapiens
gatttcctaaatgct

SEQ ID NO: 50696 - DNA, 15 bp, Homo sapiens
atttcctaaatgctt

SEQ ID NO: 50697 - DNA, 15 bp, Homo sapiens
tttcctaaatgcttc

SEQ ID NO: 50698 - DNA, 15 bp, Homo sapiens
ttcctaaatgcttca

SEQ ID NO: 50699 - DNA, 15 bp, Homo sapiens
tcctaaatgcttcat

SEQ ID NO: 50700 - DNA, 15 bp, Homo sapiens
cctaaatgcttcatt

SEQ ID NO: 50701 - DNA, 15 bp, Homo sapiens
ctaaatgcttcattt

SEQ ID NO: 50702 - DNA, 15 bp, Homo sapiens
taaatgcttcatttt

SEQ ID NO: 50703 - DNA, 15 bp, Homo sapiens
aaatgcttcattttc

SEQ ID NO: 50704 - DNA, 15 bp, Homo sapiens
aatgcttcattttct

SEQ ID NO: 50705 - DNA, 15 bp, Homo sapiens
atgcttcattttctg

SEQ ID NO: 50706 - DNA, 15 bp, Homo sapiens
tgcttcattttctgg

SEQ ID NO: 50707 - DNA, 15 bp, Homo sapiens
gcttcattttctgga

SEQ ID NO: 50708 - DNA, 15 bp, Homo sapiens
cttcattttctggat

SEQ ID NO: 50709 - DNA, 15 bp, Homo sapiens
ttcattttctggatg

SEQ ID NO: 50710 - DNA, 15 bp, Homo sapiens
tcattttctggatgc

SEQ ID NO: 50711 - DNA, 15 bp, Homo sapiens
cattttctggatgca

SEQ ID NO: 50712 - DNA, 15 bp, Homo sapiens
attttctggatgcac

SEQ ID NO: 50713 - DNA, 15 bp, Homo sapiens
ttttctggatgcacc

SEQ ID NO: 50714 - DNA, 15 bp, Homo sapiens
tttctggatgcacca

SEQ ID NO: 50715 - DNA, 15 bp, Homo sapiens
ttctggatgcaccaa

SEQ ID NO: 50716 - DNA, 15 bp, Homo sapiens
tctggatgcaccaat

SEQ ID NO: 50717 - DNA, 15 bp, Homo sapiens
ctggatgcaccaatg

SEQ ID NO: 50718 - DNA, 15 bp, Homo sapiens
tggatgcaccaatgt

SEQ ID NO: 50719 - DNA, 15 bp, Homo sapiens
ggatgcaccaatgtt

SEQ ID NO: 50720 - DNA, 15 bp, Homo sapiens
gatgcaccaatgttg

SEQ ID NO: 50721 - DNA, 15 bp, Homo sapiens
atgcaccaatgttga

SEQ ID NO: 50722 - DNA, 15 bp, Homo sapiens
tgcaccaatgttgac

SEQ ID NO: 50723 - DNA, 15 bp, Homo sapiens
gcaccaatgttgacc

SEQ ID NO: 50724 - DNA, 15 bp, Homo sapiens
caccaatgttgacct

SEQ ID NO: 50725 - DNA, 15 bp, Homo sapiens
accaatgttgaccta

SEQ ID NO: 50726 - DNA, 15 bp, Homo sapiens
ccaatgttgacctac

SEQ ID NO: 50727 - DNA, 15 bp, Homo sapiens
caatgttgacctact

SEQ ID NO: 50728 - DNA, 15 bp, Homo sapiens
aatgttgacctacta

SEQ ID NO: 50729 - DNA, 15 bp, Homo sapiens
atgttgacctactat

SEQ ID NO: 50730 - DNA, 15 bp, Homo sapiens
tgttgacctactata

SEQ ID NO: 50731 - DNA, 15 bp, Homo sapiens
gttgacctactatac

SEQ ID NO: 50732 - DNA, 15 bp, Homo sapiens
ttgacctactataca

SEQ ID NO: 50733 - DNA, 15 bp, Homo sapiens
tgacctactatacat

SEQ ID NO: 50734 - DNA, 15 bp, Homo sapiens
gacctactatacatg

SEQ ID NO: 50735 - DNA, 15 bp, Homo sapiens
acctactatacatgt

SEQ ID NO: 50736 - DNA, 15 bp, Homo sapiens
cctactatacatgtt

SEQ ID NO: 50737 - DNA, 15 bp, Homo sapiens
ctactatacatgtta

SEQ ID NO: 50738 - DNA, 15 bp, Homo sapiens
tactatacatgttaa

SEQ ID NO: 50739 - DNA, 15 bp, Homo sapiens
actatacatgttaaa

SEQ ID NO: 50740 - DNA, 15 bp, Homo sapiens
ctatacatgttaaat

SEQ ID NO: 50741 - DNA, 15 bp, Homo sapiens
tatacatgttaaatg

SEQ ID NO: 50742 - DNA, 15 bp, Homo sapiens
atacatgttaaatgg

SEQ ID NO: 50743 - DNA, 15 bp, Homo sapiens
tacatgttaaatggt

SEQ ID NO: 50744 - DNA, 15 bp, Homo sapiens
acatgttaaatggtt

SEQ ID NO: 50745 - DNA, 15 bp, Homo sapiens
catgttaaatggttt

SEQ ID NO: 50746 - DNA, 15 bp, Homo sapiens
atgttaaatggtttt

SEQ ID NO: 50747 - DNA, 15 bp, Homo sapiens
tgttaaatggtttta

SEQ ID NO: 50748 - DNA, 15 bp, Homo sapiens
gttaaatggttttaa

SEQ ID NO: 50749 - DNA, 15 bp, Homo sapiens
ttaaatggttttaaa

SEQ ID NO: 50750 - DNA, 15 bp, Homo sapiens
taaatggttttaaaa

SEQ ID NO: 50751 - DNA, 15 bp, Homo sapiens
aaatggttttaaaat

SEQ ID NO: 50752 - DNA, 15 bp, Homo sapiens
aatggttttaaaata

SEQ ID NO: 50753 - DNA, 15 bp, Homo sapiens
atggttttaaaatat

SEQ ID NO: 50754 - DNA, 15 bp, Homo sapiens
tggttttaaaatatc

SEQ ID NO: 50755 - DNA, 15 bp, Homo sapiens
ggttttaaaatatca

SEQ ID NO: 50756 - DNA, 15 bp, Homo sapiens
gttttaaaatatcac

SEQ ID NO: 50757 - DNA, 15 bp, Homo sapiens
ttttaaaatatcacc

SEQ ID NO: 50758 - DNA, 15 bp, Homo sapiens
tttaaaatatcacct

SEQ ID NO: 50759 - DNA, 15 bp, Homo sapiens
ttaaaatatcacctt

SEQ ID NO: 50760 - DNA, 15 bp, Homo sapiens
taaaatatcacctta

SEQ ID NO: 50761 - DNA, 15 bp, Homo sapiens
aaaatatcaccttaa

SEQ ID NO: 50762 - DNA, 15 bp, Homo sapiens
aaatatcaccttaaa

SEQ ID NO: 50763 - DNA, 15 bp, Homo sapiens
aatatcaccttaaaa

SEQ ID NO: 50764 - DNA, 15 bp, Homo sapiens
atatcaccttaaaat

SEQ ID NO: 50765 - DNA, 15 bp, Homo sapiens
tatcaccttaaaata

SEQ ID NO: 50766 - DNA, 15 bp, Homo sapiens
atcaccttaaaataa

SEQ ID NO: 50767 - DNA, 15 bp, Homo sapiens
tcaccttaaaataaa

SEQ ID NO: 50768 - DNA, 15 bp, Homo sapiens
caccttaaaataaag

SEQ ID NO: 50769 - DNA, 15 bp, Homo sapiens
accttaaaataaagg

SEQ ID NO: 50770 - DNA, 15 bp, Homo sapiens
ccttaaaataaagga

SEQ ID NO: 50771 - DNA, 15 bp, Homo sapiens
cttaaaataaaggaa

SEQ ID NO: 50772 - DNA, 15 bp, Homo sapiens
ttaaaataaaggaaa

SEQ ID NO: 50773 - DNA, 15 bp, Homo sapiens
taaaataaaggaaac

SEQ ID NO: 50774 - DNA, 15 bp, Homo sapiens
aaaataaaggaaact

SEQ ID NO: 50775 - DNA, 15 bp, Homo sapiens
aaataaaggaaactt

SEQ ID NO: 50776 - DNA, 15 bp, Homo sapiens
aataaaggaaacttc

SEQ ID NO: 50777 - DNA, 15 bp, Homo sapiens
ataaaggaaacttcc

SEQ ID NO: 50778 - DNA, 15 bp, Homo sapiens
taaaggaaacttcca

SEQ ID NO: 50779 - DNA, 15 bp, Homo sapiens
aaaggaaacttccag

SEQ ID NO: 50780 - DNA, 15 bp, Homo sapiens
aaggaaacttccagc

SEQ ID NO: 50781 - DNA, 15 bp, Homo sapiens
aggaaacttccagct

SEQ ID NO: 50782 - DNA, 15 bp, Homo sapiens
ggaaacttccagcta

SEQ ID NO: 50783 - DNA, 15 bp, Homo sapiens
gaaacttccagctac

SEQ ID NO: 50784 - DNA, 15 bp, Homo sapiens
aaacttccagctact

SEQ ID NO: 50785 - DNA, 15 bp, Homo sapiens
aacttccagctacta

SEQ ID NO: 50786 - DNA, 15 bp, Homo sapiens
acttccagctactaa

SEQ ID NO: 50787 - DNA, 15 bp, Homo sapiens
cttccagctactaac

SEQ ID NO: 50788 - DNA, 15 bp, Homo sapiens
ttccagctactaact

SEQ ID NO: 50789 - DNA, 15 bp, Homo sapiens
tccagctactaactc

SEQ ID NO: 50790 - DNA, 15 bp, Homo sapiens
ccagctactaactca

SEQ ID NO: 50791 - DNA, 15 bp, Homo sapiens
cagctactaactcag

SEQ ID NO: 50792 - DNA, 15 bp, Homo sapiens
agctactaactcagc

SEQ ID NO: 50793 - DNA, 15 bp, Homo sapiens
gctactaactcagct

SEQ ID NO: 50794 - DNA, 15 bp, Homo sapiens
ctactaactcagctc

SEQ ID NO: 50795 - DNA, 15 bp, Homo sapiens
tactaactcagctct

SEQ ID NO: 50796 - DNA, 15 bp, Homo sapiens
actaactcagctctg

SEQ ID NO: 50797 - DNA, 15 bp, Homo sapiens
ctaactcagctctga

SEQ ID NO: 50798 - DNA, 15 bp, Homo sapiens
taactcagctctgaa

SEQ ID NO: 50799 - DNA, 15 bp, Homo sapiens
aactcagctctgaat

SEQ ID NO: 50800 - DNA, 15 bp, Homo sapiens
actcagctctgaatg

SEQ ID NO: 50801 - DNA, 15 bp, Homo sapiens
ctcagctctgaatgg

SEQ ID NO: 50802 - DNA, 15 bp, Homo sapiens
tcagctctgaatggg

SEQ ID NO: 50803 - DNA, 15 bp, Homo sapiens
cagctctgaatgggc

SEQ ID NO: 50804 - DNA, 15 bp, Homo sapiens
agctctgaatgggct

SEQ ID NO: 50805 - DNA, 15 bp, Homo sapiens
gctctgaatgggcta

SEQ ID NO: 50806 - DNA, 15 bp, Homo sapiens
ctctgaatgggctat

SEQ ID NO: 50807 - DNA, 15 bp, Homo sapiens
tctgaatgggctatg

SEQ ID NO: 50808 - DNA, 15 bp, Homo sapiens
ctgaatgggctatga

SEQ ID NO: 50809 - DNA, 15 bp, Homo sapiens
tgaatgggctatgaa

SEQ ID NO: 50810 - DNA, 15 bp, Homo sapiens
gaatgggctatgaaa

SEQ ID NO: 50811 - DNA, 15 bp, Homo sapiens
aatgggctatgaaag

SEQ ID NO: 50812 - DNA, 15 bp, Homo sapiens
atgggctatgaaagg

SEQ ID NO: 50813 - DNA, 15 bp, Homo sapiens
tgggctatgaaaggc

SEQ ID NO: 50814 - DNA, 15 bp, Homo sapiens
gggctatgaaaggct

SEQ ID NO: 50815 - DNA, 15 bp, Homo sapiens
ggctatgaaaggctc

SEQ ID NO: 50816 - DNA, 15 bp, Homo sapiens
gctatgaaaggctcc

SEQ ID NO: 50817 - DNA, 15 bp, Homo sapiens
ctatgaaaggctcca

SEQ ID NO: 50818 - DNA, 15 bp, Homo sapiens
tatgaaaggctccaa

SEQ ID NO: 50819 - DNA, 15 bp, Homo sapiens
atgaaaggctccaaa

SEQ ID NO: 50820 - DNA, 15 bp, Homo sapiens
tgaaaggctccaaag

SEQ ID NO: 50821 - DNA, 15 bp, Homo sapiens
gaaaggctccaaagg

SEQ ID NO: 50822 - DNA, 15 bp, Homo sapiens
aaaggctccaaaggt

SEQ ID NO: 50823 - DNA, 15 bp, Homo sapiens
aaggctccaaaggta

SEQ ID NO: 50824 - DNA, 15 bp, Homo sapiens
aggctccaaaggtat

SEQ ID NO: 50825 - DNA, 15 bp, Homo sapiens
ggctccaaaggtatg

SEQ ID NO: 50826 - DNA, 15 bp, Homo sapiens
gctccaaaggtatgt

SEQ ID NO: 50827 - DNA, 15 bp, Homo sapiens
ctccaaaggtatgtg

SEQ ID NO: 50828 - DNA, 15 bp, Homo sapiens
tccaaaggtatgtga

SEQ ID NO: 50829 - DNA, 15 bp, Homo sapiens
ccaaaggtatgtgaa

SEQ ID NO: 50830 - DNA, 15 bp, Homo sapiens
caaaggtatgtgaaa

SEQ ID NO: 50831 - DNA, 15 bp, Homo sapiens
aaaggtatgtgaaaa

SEQ ID NO: 50832 - DNA, 15 bp, Homo sapiens
aaggtatgtgaaaaa

SEQ ID NO: 50833 - DNA, 15 bp, Homo sapiens
aggtatgtgaaaaat

SEQ ID NO: 50834 - DNA, 15 bp, Homo sapiens
ggtatgtgaaaaatt

SEQ ID NO: 50835 - DNA, 15 bp, Homo sapiens
gtatgtgaaaaatta

SEQ ID NO: 50836 - DNA, 15 bp, Homo sapiens
tatgtgaaaaattac

SEQ ID NO: 50837 - DNA, 15 bp, Homo sapiens
atgtgaaaaattact

SEQ ID NO: 50838 - DNA, 15 bp, Homo sapiens
tgtgaaaaattactg

SEQ ID NO: 50839 - DNA, 15 bp, Homo sapiens
gtgaaaaattactgt

SEQ ID NO: 50840 - DNA, 15 bp, Homo sapiens
tgaaaaattactgtt

SEQ ID NO: 50841 - DNA, 15 bp, Homo sapiens
gaaaaattactgtta

SEQ ID NO: 50842 - DNA, 15 bp, Homo sapiens
aaaaattactgttat

SEQ ID NO: 50843 - DNA, 15 bp, Homo sapiens
aaaattactgttatt

SEQ ID NO: 50844 - DNA, 15 bp, Homo sapiens
aaattactgttattt

SEQ ID NO: 50845 - DNA, 15 bp, Homo sapiens
aattactgttatttt

SEQ ID NO: 50846 - DNA, 15 bp, Homo sapiens
attactgttattttg

SEQ ID NO: 50847 - DNA, 15 bp, Homo sapiens
ttactgttattttgc

SEQ ID NO: 50848 - DNA, 15 bp, Homo sapiens
tactgttattttgct

SEQ ID NO: 50849 - DNA, 15 bp, Homo sapiens
actgttattttgctt

SEQ ID NO: 50850 - DNA, 15 bp, Homo sapiens
ctgttattttgcttt

SEQ ID NO: 50851 - DNA, 15 bp, Homo sapiens
tgttattttgcttta

SEQ ID NO: 50852 - DNA, 15 bp, Homo sapiens
gttattttgctttaa

SEQ ID NO: 50853 - DNA, 15 bp, Homo sapiens
ttattttgctttaaa

SEQ ID NO: 50854 - DNA, 15 bp, Homo sapiens
tattttgctttaaaa

SEQ ID NO: 50855 - DNA, 15 bp, Homo sapiens
attttgctttaaaaa

SEQ ID NO: 50856 - DNA, 15 bp, Homo sapiens
ttttgctttaaaaaa

SEQ ID NO: 50857 - DNA, 15 bp, Homo sapiens
tttgctttaaaaaat

SEQ ID NO: 50858 - DNA, 15 bp, Homo sapiens
ttgctttaaaaaatg

SEQ ID NO: 50859 - DNA, 15 bp, Homo sapiens
tgctttaaaaaatgt

SEQ ID NO: 50860 - DNA, 15 bp, Homo sapiens
gctttaaaaaatgtg

SEQ ID NO: 50861 - DNA, 15 bp, Homo sapiens
ctttaaaaaatgtga

SEQ ID NO: 50862 - DNA, 15 bp, Homo sapiens
tttaaaaaatgtgat

SEQ ID NO: 50863 - DNA, 15 bp, Homo sapiens
ttaaaaaatgtgatg

SEQ ID NO: 50864 - DNA, 15 bp, Homo sapiens
taaaaaatgtgatgt

SEQ ID NO: 50865 - DNA, 15 bp, Homo sapiens
aaaaaatgtgatgtc

SEQ ID NO: 50866 - DNA, 15 bp, Homo sapiens
aaaaatgtgatgtct

SEQ ID NO: 50867 - DNA, 15 bp, Homo sapiens
aaaatgtgatgtcta

SEQ ID NO: 50868 - DNA, 15 bp, Homo sapiens
aaatgtgatgtctaa

SEQ ID NO: 50869 - DNA, 15 bp, Homo sapiens
aatgtgatgtctaag

SEQ ID NO: 50870 - DNA, 15 bp, Homo sapiens
atgtgatgtctaaga

SEQ ID NO: 50871 - DNA, 15 bp, Homo sapiens
tgtgatgtctaagag

SEQ ID NO: 50872 - DNA, 15 bp, Homo sapiens
gtgatgtctaagagt

SEQ ID NO: 50873 - DNA, 15 bp, Homo sapiens
tgatgtctaagagtg

SEQ ID NO: 50874 - DNA, 15 bp, Homo sapiens
gatgtctaagagtgt

SEQ ID NO: 50875 - DNA, 15 bp, Homo sapiens
atgtctaagagtgtc

SEQ ID NO: 50876 - DNA, 15 bp, Homo sapiens
tgtctaagagtgtct

SEQ ID NO: 50877 - DNA, 15 bp, Homo sapiens
gtctaagagtgtctg

SEQ ID NO: 50878 - DNA, 15 bp, Homo sapiens
tctaagagtgtctgc

SEQ ID NO: 50879 - DNA, 15 bp, Homo sapiens
ctaagagtgtctgca

SEQ ID NO: 50880 - DNA, 15 bp, Homo sapiens
taagagtgtctgcaa

SEQ ID NO: 50881 - DNA, 15 bp, Homo sapiens
aagagtgtctgcaat

SEQ ID NO: 50882 - DNA, 15 bp, Homo sapiens
agagtgtctgcaatg

SEQ ID NO: 50883 - DNA, 15 bp, Homo sapiens
gagtgtctgcaatgt

SEQ ID NO: 50884 - DNA, 15 bp, Homo sapiens
agtgtctgcaatgtt

SEQ ID NO: 50885 - DNA, 15 bp, Homo sapiens
gtgtctgcaatgttc

SEQ ID NO: 50886 - DNA, 15 bp, Homo sapiens
tgtctgcaatgttct

SEQ ID NO: 50887 - DNA, 15 bp, Homo sapiens
gtctgcaatgttcta

SEQ ID NO: 50888 - DNA, 15 bp, Homo sapiens
tctgcaatgttctaa

SEQ ID NO: 50889 - DNA, 15 bp, Homo sapiens
ctgcaatgttctaat

SEQ ID NO: 50890 - DNA, 15 bp, Homo sapiens
tgcaatgttctaatg

SEQ ID NO: 50891 - DNA, 15 bp, Homo sapiens
gcaatgttctaatgc

SEQ ID NO: 50892 - DNA, 15 bp, Homo sapiens
caatgttctaatgct

SEQ ID NO: 50893 - DNA, 15 bp, Homo sapiens
aatgttctaatgctt

SEQ ID NO: 50894 - DNA, 15 bp, Homo sapiens
atgttctaatgcttc

SEQ ID NO: 50895 - DNA, 15 bp, Homo sapiens
tgttctaatgcttca

SEQ ID NO: 50896 - DNA, 15 bp, Homo sapiens
gttctaatgcttcaa

SEQ ID NO: 50897 - DNA, 15 bp, Homo sapiens
ttctaatgcttcaaa

SEQ ID NO: 50898 - DNA, 15 bp, Homo sapiens
tctaatgcttcaaaa

SEQ ID NO: 50899 - DNA, 15 bp, Homo sapiens
ctaatgcttcaaaac

SEQ ID NO: 50900 - DNA, 15 bp, Homo sapiens
taatgcttcaaaaca

SEQ ID NO: 50901 - DNA, 15 bp, Homo sapiens
aatgcttcaaaacat

SEQ ID NO: 50902 - DNA, 15 bp, Homo sapiens
atgcttcaaaacatg

SEQ ID NO: 50903 - DNA, 15 bp, Homo sapiens
tgcttcaaaacatgt

SEQ ID NO: 50904 - DNA, 15 bp, Homo sapiens
gcttcaaaacatgta

SEQ ID NO: 50905 - DNA, 15 bp, Homo sapiens
cttcaaaacatgtac

SEQ ID NO: 50906 - DNA, 15 bp, Homo sapiens
ttcaaaacatgtacg

SEQ ID NO: 50907 - DNA, 15 bp, Homo sapiens
tcaaaacatgtacgt

SEQ ID NO: 50908 - DNA, 15 bp, Homo sapiens
caaaacatgtacgta

SEQ ID NO: 50909 - DNA, 15 bp, Homo sapiens
aaaacatgtacgtaa

SEQ ID NO: 50910 - DNA, 15 bp, Homo sapiens
aaacatgtacgtaag

SEQ ID NO: 50911 - DNA, 15 bp, Homo sapiens
aacatgtacgtaagc

SEQ ID NO: 50912 - DNA, 15 bp, Homo sapiens
acatgtacgtaagcc

SEQ ID NO: 50913 - DNA, 15 bp, Homo sapiens
catgtacgtaagcct

SEQ ID NO: 50914 - DNA, 15 bp, Homo sapiens
atgtacgtaagcctt

SEQ ID NO: 50915 - DNA, 15 bp, Homo sapiens
tgtacgtaagccttg

SEQ ID NO: 50916 - DNA, 15 bp, Homo sapiens
gtacgtaagccttgt

SEQ ID NO: 50917 - DNA, 15 bp, Homo sapiens
tacgtaagccttgtt

SEQ ID NO: 50918 - DNA, 15 bp, Homo sapiens
acgtaagccttgttt

SEQ ID NO: 50919 - DNA, 15 bp, Homo sapiens
cgtaagccttgttta

SEQ ID NO: 50920 - DNA, 15 bp, Homo sapiens
gtaagccttgtttat

SEQ ID NO: 50921 - DNA, 15 bp, Homo sapiens
taagccttgtttatc

SEQ ID NO: 50922 - DNA, 15 bp, Homo sapiens
aagccttgtttatct

SEQ ID NO: 50923 - DNA, 15 bp, Homo sapiens
agccttgtttatctg

SEQ ID NO: 50924 - DNA, 15 bp, Homo sapiens
gccttgtttatctgg

SEQ ID NO: 50925 - DNA, 15 bp, Homo sapiens
ccttgtttatctgga

SEQ ID NO: 50926 - DNA, 15 bp, Homo sapiens
cttgtttatctggaa

SEQ ID NO: 50927 - DNA, 15 bp, Homo sapiens
ttgtttatctggaaa

SEQ ID NO: 50928 - DNA, 15 bp, Homo sapiens
tgtttatctggaaat

SEQ ID NO: 50929 - DNA, 15 bp, Homo sapiens
gtttatctggaaatc

SEQ ID NO: 50930 - DNA, 15 bp, Homo sapiens
tttatctggaaatca

SEQ ID NO: 50931 - DNA, 15 bp, Homo sapiens
ttatctggaaatcat

SEQ ID NO: 50932 - DNA, 15 bp, Homo sapiens
tatctggaaatcatt

SEQ ID NO: 50933 - DNA, 15 bp, Homo sapiens
atctggaaatcattt

SEQ ID NO: 50934 - DNA, 15 bp, Homo sapiens
tctggaaatcatttc

SEQ ID NO: 50935 - DNA, 15 bp, Homo sapiens
ctggaaatcatttct

SEQ ID NO: 50936 - DNA, 15 bp, Homo sapiens
tggaaatcatttctt

SEQ ID NO: 50937 - DNA, 15 bp, Homo sapiens
ggaaatcatttcttt

SEQ ID NO: 50938 - DNA, 15 bp, Homo sapiens
gaaatcatttctttc

SEQ ID NO: 50939 - DNA, 15 bp, Homo sapiens
aaatcatttctttct

SEQ ID NO: 50940 - DNA, 15 bp, Homo sapiens
aatcatttctttctg

SEQ ID NO: 50941 - DNA, 15 bp, Homo sapiens
atcatttctttctgc

SEQ ID NO: 50942 - DNA, 15 bp, Homo sapiens
tcatttctttctgct

SEQ ID NO: 50943 - DNA, 15 bp, Homo sapiens
catttctttctgctt

SEQ ID NO: 50944 - DNA, 15 bp, Homo sapiens
atttctttctgctta

SEQ ID NO: 50945 - DNA, 15 bp, Homo sapiens
tttctttctgcttat

SEQ ID NO: 50946 - DNA, 15 bp, Homo sapiens
ttctttctgcttata

SEQ ID NO: 50947 - DNA, 15 bp, Homo sapiens
tctttctgcttatat

SEQ ID NO: 50948 - DNA, 15 bp, Homo sapiens
ctttctgcttatatc

SEQ ID NO: 50949 - DNA, 15 bp, Homo sapiens
tttctgcttatatca

SEQ ID NO: 50950 - DNA, 15 bp, Homo sapiens
ttctgcttatatcat

SEQ ID NO: 50951 - DNA, 15 bp, Homo sapiens
tctgcttatatcatt

SEQ ID NO: 50952 - DNA, 15 bp, Homo sapiens
ctgcttatatcattt

SEQ ID NO: 50953 - DNA, 15 bp, Homo sapiens
tgcttatatcattta

SEQ ID NO: 50954 - DNA, 15 bp, Homo sapiens
gcttatatcatttat

SEQ ID NO: 50955 - DNA, 15 bp, Homo sapiens
cttatatcatttata

SEQ ID NO: 50956 - DNA, 15 bp, Homo sapiens
ttatatcatttataa

SEQ ID NO: 50957 - DNA, 15 bp, Homo sapiens
tatatcatttataaa

SEQ ID NO: 50958 - DNA, 15 bp, Homo sapiens
atatcatttataaat

SEQ ID NO: 50959 - DNA, 15 bp, Homo sapiens
tatcatttataaata

SEQ ID NO: 50960 - DNA, 15 bp, Homo sapiens
atcatttataaatag

SEQ ID NO: 50961 - DNA, 15 bp, Homo sapiens
tcatttataaataga

SEQ ID NO: 50962 - DNA, 15 bp, Homo sapiens
catttataaatagaa

SEQ ID NO: 50963 - DNA, 15 bp, Homo sapiens
atttataaatagaaa

SEQ ID NO: 50964 - DNA, 15 bp, Homo sapiens
tttataaatagaaaa

SEQ ID NO: 50965 - DNA, 15 bp, Homo sapiens
ttataaatagaaaat

SEQ ID NO: 50966 - DNA, 15 bp, Homo sapiens
tataaatagaaaatg

SEQ ID NO: 50967 - DNA, 15 bp, Homo sapiens
ataaatagaaaatgt

SEQ ID NO: 50968 - DNA, 15 bp, Homo sapiens
taaatagaaaatgtt

SEQ ID NO: 50969 - DNA, 15 bp, Homo sapiens
aaatagaaaatgttc

SEQ ID NO: 50970 - DNA, 15 bp, Homo sapiens
aatagaaaatgttct

SEQ ID NO: 50971 - DNA, 15 bp, Homo sapiens
atagaaaatgttctg

SEQ ID NO: 50972 - DNA, 15 bp, Homo sapiens
tagaaaatgttctgt

SEQ ID NO: 50973 - DNA, 15 bp, Homo sapiens
agaaaatgttctgta

SEQ ID NO: 50974 - DNA, 15 bp, Homo sapiens
gaaaatgttctgtaa

SEQ ID NO: 50975 - DNA, 15 bp, Homo sapiens
aaaatgttctgtaat

SEQ ID NO: 50976 - DNA, 15 bp, Homo sapiens
aaatgttctgtaata

SEQ ID NO: 50977 - DNA, 15 bp, Homo sapiens
aatgttctgtaataa

SEQ ID NO: 50978 - DNA, 15 bp, Homo sapiens
atgttctgtaataac

SEQ ID NO: 50979 - DNA, 15 bp, Homo sapiens
tgttctgtaataact

SEQ ID NO: 50980 - DNA, 15 bp, Homo sapiens
gttctgtaataactt

SEQ ID NO: 50981 - DNA, 15 bp, Homo sapiens
ttctgtaataactta

SEQ ID NO: 50982 - DNA, 15 bp, Homo sapiens
tctgtaataacttaa

SEQ ID NO: 50983 - DNA, 15 bp, Homo sapiens
ctgtaataacttaaa

SEQ ID NO: 50984 - DNA, 15 bp, Homo sapiens
tgtaataacttaaaa

SEQ ID NO: 50985 - DNA, 15 bp, Homo sapiens
gtaataacttaaaat

SEQ ID NO: 50986 - DNA, 15 bp, Homo sapiens
taataacttaaaata

SEQ ID NO: 50987 - DNA, 15 bp, Homo sapiens
aataacttaaaatag

SEQ ID NO: 50988 - DNA, 15 bp, Homo sapiens
ataacttaaaatagt

SEQ ID NO: 50989 - DNA, 15 bp, Homo sapiens
taacttaaaatagtt

SEQ ID NO: 50990 - DNA, 15 bp, Homo sapiens
aacttaaaatagttc

SEQ ID NO: 50991 - DNA, 15 bp, Homo sapiens
acttaaaatagttcc

SEQ ID NO: 50992 - DNA, 15 bp, Homo sapiens
cttaaaatagttcca

SEQ ID NO: 50993 - DNA, 15 bp, Homo sapiens
ttaaaatagttccac

SEQ ID NO: 50994 - DNA, 15 bp, Homo sapiens
taaaatagttccaca

SEQ ID NO: 50995 - DNA, 15 bp, Homo sapiens
aaaatagttccacat

SEQ ID NO: 50996 - DNA, 15 bp, Homo sapiens
aaatagttccacata

SEQ ID NO: 50997 - DNA, 15 bp, Homo sapiens
aatagttccacatac

SEQ ID NO: 50998 - DNA, 15 bp, Homo sapiens
atagttccacataca

SEQ ID NO: 50999 - DNA, 15 bp, Homo sapiens
tagttccacatacat

SEQ ID NO: 51000 - DNA, 15 bp, Homo sapiens
agttccacatacata

SEQ ID NO: 51001 - DNA, 15 bp, Homo sapiens
gttccacatacataa

SEQ ID NO: 51002 - DNA, 15 bp, Homo sapiens
ttccacatacataat

SEQ ID NO: 51003 - DNA, 15 bp, Homo sapiens
tccacatacataatg

SEQ ID NO: 51004 - DNA, 15 bp, Homo sapiens
ccacatacataatgc

SEQ ID NO: 51005 - DNA, 15 bp, Homo sapiens
cacatacataatgct

SEQ ID NO: 51006 - DNA, 15 bp, Homo sapiens
acatacataatgctt

SEQ ID NO: 51007 - DNA, 15 bp, Homo sapiens
catacataatgcttt

SEQ ID NO: 51008 - DNA, 15 bp, Homo sapiens
atacataatgctttt

SEQ ID NO: 51009 - DNA, 15 bp, Homo sapiens
tacataatgctttta

SEQ ID NO: 51010 - DNA, 15 bp, Homo sapiens
acataatgcttttag

SEQ ID NO: 51011 - DNA, 15 bp, Homo sapiens
cataatgcttttagt

SEQ ID NO: 51012 - DNA, 15 bp, Homo sapiens
ataatgcttttagtg

SEQ ID NO: 51013 - DNA, 15 bp, Homo sapiens
taatgcttttagtgt

SEQ ID NO: 51014 - DNA, 15 bp, Homo sapiens
aatgcttttagtgtc

SEQ ID NO: 51015 - DNA, 15 bp, Homo sapiens
atgcttttagtgtca

SEQ ID NO: 51016 - DNA, 15 bp, Homo sapiens
tgcttttagtgtcat

SEQ ID NO: 51017 - DNA, 15 bp, Homo sapiens
gcttttagtgtcata

SEQ ID NO: 51018 - DNA, 15 bp, Homo sapiens
cttttagtgtcataa

SEQ ID NO: 51019 - DNA, 15 bp, Homo sapiens
ttttagtgtcataat

SEQ ID NO: 51020 - DNA, 15 bp, Homo sapiens
tttagtgtcataata

SEQ ID NO: 51021 - DNA, 15 bp, Homo sapiens
ttagtgtcataatac

SEQ ID NO: 51022 - DNA, 15 bp, Homo sapiens
tagtgtcataatact

SEQ ID NO: 51023 - DNA, 15 bp, Homo sapiens
agtgtcataatactt

SEQ ID NO: 51024 - DNA, 15 bp, Homo sapiens
gtgtcataatactta

SEQ ID NO: 51025 - DNA, 15 bp, Homo sapiens
tgtcataatacttac

SEQ ID NO: 51026 - DNA, 15 bp, Homo sapiens
gtcataatacttact

SEQ ID NO: 51027 - DNA, 15 bp, Homo sapiens
tcataatacttacta

SEQ ID NO: 51028 - DNA, 15 bp, Homo sapiens
cataatacttactac

SEQ ID NO: 51029 - DNA, 15 bp, Homo sapiens
ataatacttactact

SEQ ID NO: 51030 - DNA, 15 bp, Homo sapiens
taatacttactactg

SEQ ID NO: 51031 - DNA, 15 bp, Homo sapiens
aatacttactactgg

SEQ ID NO: 51032 - DNA, 15 bp, Homo sapiens
atacttactactggt

SEQ ID NO: 51033 - DNA, 15 bp, Homo sapiens
tacttactactggtc

SEQ ID NO: 51034 - DNA, 15 bp, Homo sapiens
acttactactggtct

SEQ ID NO: 51035 - DNA, 15 bp, Homo sapiens
cttactactggtcta

SEQ ID NO: 51036 - DNA, 15 bp, Homo sapiens
ttactactggtctat

SEQ ID NO: 51037 - DNA, 15 bp, Homo sapiens
tactactggtctata

SEQ ID NO: 51038 - DNA, 15 bp, Homo sapiens
actactggtctatat

SEQ ID NO: 51039 - DNA, 15 bp, Homo sapiens
ctactggtctatatt

SEQ ID NO: 51040 - DNA, 15 bp, Homo sapiens
tactggtctatattt

SEQ ID NO: 51041 - DNA, 15 bp, Homo sapiens
actggtctatattta

SEQ ID NO: 51042 - DNA, 15 bp, Homo sapiens
ctggtctatatttac

SEQ ID NO: 51043 - DNA, 15 bp, Homo sapiens
tggtctatatttacc

SEQ ID NO: 51044 - DNA, 15 bp, Homo sapiens
ggtctatatttacca

SEQ ID NO: 51045 - DNA, 15 bp, Homo sapiens
gtctatatttaccaa

SEQ ID NO: 51046 - DNA, 15 bp, Homo sapiens
tctatatttaccaac

SEQ ID NO: 51047 - DNA, 15 bp, Homo sapiens
ctatatttaccaaca

SEQ ID NO: 51048 - DNA, 15 bp, Homo sapiens
tatatttaccaacat

SEQ ID NO: 51049 - DNA, 15 bp, Homo sapiens
atatttaccaacatt

SEQ ID NO: 51050 - DNA, 15 bp, Homo sapiens
tatttaccaacattt

SEQ ID NO: 51051 - DNA, 15 bp, Homo sapiens
atttaccaacattta

SEQ ID NO: 51052 - DNA, 15 bp, Homo sapiens
tttaccaacatttat

SEQ ID NO: 51053 - DNA, 15 bp, Homo sapiens
ttaccaacatttatc

SEQ ID NO: 51054 - DNA, 15 bp, Homo sapiens
taccaacatttatca

SEQ ID NO: 51055 - DNA, 15 bp, Homo sapiens
accaacatttatcac

SEQ ID NO: 51056 - DNA, 15 bp, Homo sapiens
ccaacatttatcaca

SEQ ID NO: 51057 - DNA, 15 bp, Homo sapiens
caacatttatcacat

SEQ ID NO: 51058 - DNA, 15 bp, Homo sapiens
aacatttatcacatt

SEQ ID NO: 51059 - DNA, 15 bp, Homo sapiens
acatttatcacattt

SEQ ID NO: 51060 - DNA, 15 bp, Homo sapiens
catttatcacatttt

SEQ ID NO: 51061 - DNA, 15 bp, Homo sapiens
atttatcacatttta

SEQ ID NO: 51062 - DNA, 15 bp, Homo sapiens
tttatcacattttac

SEQ ID NO: 51063 - DNA, 15 bp, Homo sapiens
ttatcacattttaca

SEQ ID NO: 51064 - DNA, 15 bp, Homo sapiens
tatcacattttacaa

SEQ ID NO: 51065 - DNA, 15 bp, Homo sapiens
atcacattttacaaa

SEQ ID NO: 51066 - DNA, 15 bp, Homo sapiens
tcacattttacaaaa

SEQ ID NO: 51067 - DNA, 15 bp, Homo sapiens
cacattttacaaaat

SEQ ID NO: 51068 - DNA, 15 bp, Homo sapiens
acattttacaaaatg

SEQ ID NO: 51069 - DNA, 15 bp, Homo sapiens
cattttacaaaatga

SEQ ID NO: 51070 - DNA, 15 bp, Homo sapiens
attttacaaaatgaa

SEQ ID NO: 51071 - DNA, 15 bp, Homo sapiens
ttttacaaaatgaag

SEQ ID NO: 51072 - DNA, 15 bp, Homo sapiens
tttacaaaatgaagt

SEQ ID NO: 51073 - DNA, 15 bp, Homo sapiens
ttacaaaatgaagta

SEQ ID NO: 51074 - DNA, 15 bp, Homo sapiens
tacaaaatgaagtag

SEQ ID NO: 51075 - DNA, 15 bp, Homo sapiens
acaaaatgaagtaga

SEQ ID NO: 51076 - DNA, 15 bp, Homo sapiens
caaaatgaagtagaa

SEQ ID NO: 51077 - DNA, 15 bp, Homo sapiens
aaaatgaagtagaag

SEQ ID NO: 51078 - DNA, 15 bp, Homo sapiens
aaatgaagtagaaga

SEQ ID NO: 51079 - DNA, 15 bp, Homo sapiens
aatgaagtagaagaa

SEQ ID NO: 51080 - DNA, 15 bp, Homo sapiens
atgaagtagaagaaa

SEQ ID NO: 51081 - DNA, 15 bp, Homo sapiens
tgaagtagaagaaaa

SEQ ID NO: 51082 - DNA, 15 bp, Homo sapiens
gaagtagaagaaaaa

SEQ ID NO: 51083 - DNA, 15 bp, Homo sapiens
aagtagaagaaaaaa

SEQ ID NO: 51084 - DNA, 15 bp, Homo sapiens
agtagaagaaaaaaa

SEQ ID NO: 51085 - DNA, 15 bp, Homo sapiens
gtagaagaaaaaaaa

SEQ ID NO: 51086 - DNA, 15 bp, Homo sapiens
tagaagaaaaaaaag

SEQ ID NO: 51087 - DNA, 15 bp, Homo sapiens
agaagaaaaaaaaga

SEQ ID NO: 51088 - DNA, 15 bp, Homo sapiens
gaagaaaaaaaagac

SEQ ID NO: 51089 - DNA, 15 bp, Homo sapiens
aagaaaaaaaagaca

SEQ ID NO: 51090 - DNA, 15 bp, Homo sapiens
agaaaaaaaagacaa

SEQ ID NO: 51091 - DNA, 15 bp, Homo sapiens
gaaaaaaaagacaac

SEQ ID NO: 51092 - DNA, 15 bp, Homo sapiens
aaaaaaaagacaacg

SEQ ID NO: 51093 - DNA, 15 bp, Homo sapiens
aaaaaaagacaacga

SEQ ID NO: 51094 - DNA, 15 bp, Homo sapiens
aaaaaagacaacgac

SEQ ID NO: 51095 - DNA, 15 bp, Homo sapiens
aaaaagacaacgact

SEQ ID NO: 51096 - DNA, 15 bp, Homo sapiens
aaaagacaacgactt

SEQ ID NO: 51097 - DNA, 15 bp, Homo sapiens
aaagacaacgacttt

SEQ ID NO: 51098 - DNA, 15 bp, Homo sapiens
aagacaacgacttta

SEQ ID NO: 51099 - DNA, 15 bp, Homo sapiens
agacaacgactttat

SEQ ID NO: 51100 - DNA, 15 bp, Homo sapiens
gacaacgactttatg

SEQ ID NO: 51101 - DNA, 15 bp, Homo sapiens
acaacgactttatgg

SEQ ID NO: 51102 - DNA, 15 bp, Homo sapiens
caacgactttatggc

SEQ ID NO: 51103 - DNA, 15 bp, Homo sapiens
aacgactttatggcc

SEQ ID NO: 51104 - DNA, 15 bp, Homo sapiens
acgactttatggccc

SEQ ID NO: 51105 - DNA, 15 bp, Homo sapiens
cgactttatggccct

SEQ ID NO: 51106 - DNA, 15 bp, Homo sapiens
gactttatggccctg

SEQ ID NO: 51107 - DNA, 15 bp, Homo sapiens
actttatggccctgg

SEQ ID NO: 51108 - DNA, 15 bp, Homo sapiens
ctttatggccctgga

SEQ ID NO: 51109 - DNA, 15 bp, Homo sapiens
tttatggccctggaa

SEQ ID NO: 51110 - DNA, 15 bp, Homo sapiens
ttatggccctggaat

SEQ ID NO: 51111 - DNA, 15 bp, Homo sapiens
tatggccctggaatt

SEQ ID NO: 51112 - DNA, 15 bp, Homo sapiens
atggccctggaattc

SEQ ID NO: 51113 - DNA, 15 bp, Homo sapiens
tggccctggaattcc

SEQ ID NO: 51114 - DNA, 15 bp, Homo sapiens
ggccctggaattcca

SEQ ID NO: 51115 - DNA, 15 bp, Homo sapiens
gccctggaattccag

SEQ ID NO: 51116 - DNA, 15 bp, Homo sapiens
ccctggaattccagt

SEQ ID NO: 51117 - DNA, 15 bp, Homo sapiens
cctggaattccagta

SEQ ID NO: 51118 - DNA, 15 bp, Homo sapiens
ctggaattccagtaa

SEQ ID NO: 51119 - DNA, 15 bp, Homo sapiens
tggaattccagtaat

SEQ ID NO: 51120 - DNA, 15 bp, Homo sapiens
ggaattccagtaatg

SEQ ID NO: 51121 - DNA, 15 bp, Homo sapiens
gaattccagtaatgg

SEQ ID NO: 51122 - DNA, 15 bp, Homo sapiens
aattccagtaatggt

SEQ ID NO: 51123 - DNA, 15 bp, Homo sapiens
attccagtaatggtg

SEQ ID NO: 51124 - DNA, 15 bp, Homo sapiens
ttccagtaatggtga

SEQ ID NO: 51125 - DNA, 15 bp, Homo sapiens
tccagtaatggtgac

SEQ ID NO: 51126 - DNA, 15 bp, Homo sapiens
ccagtaatggtgacc

SEQ ID NO: 51127 - DNA, 15 bp, Homo sapiens
cagtaatggtgacca

SEQ ID NO: 51128 - DNA, 15 bp, Homo sapiens
agtaatggtgaccaa

SEQ ID NO: 51129 - DNA, 15 bp, Homo sapiens
gtaatggtgaccaac

SEQ ID NO: 51130 - DNA, 15 bp, Homo sapiens
taatggtgaccaaca

SEQ ID NO: 51131 - DNA, 15 bp, Homo sapiens
aatggtgaccaacat

SEQ ID NO: 51132 - DNA, 15 bp, Homo sapiens
atggtgaccaacatg

SEQ ID NO: 51133 - DNA, 15 bp, Homo sapiens
tggtgaccaacatgt

SEQ ID NO: 51134 - DNA, 15 bp, Homo sapiens
ggtgaccaacatgtt

SEQ ID NO: 51135 - DNA, 15 bp, Homo sapiens
gtgaccaacatgttt

SEQ ID NO: 51136 - DNA, 15 bp, Homo sapiens
tgaccaacatgtttt

SEQ ID NO: 51137 - DNA, 15 bp, Homo sapiens
gaccaacatgtttta

SEQ ID NO: 51138 - DNA, 15 bp, Homo sapiens
accaacatgttttaa

SEQ ID NO: 51139 - DNA, 15 bp, Homo sapiens
ccaacatgttttaaa

SEQ ID NO: 51140 - DNA, 15 bp, Homo sapiens
caacatgttttaaat

SEQ ID NO: 51141 - DNA, 15 bp, Homo sapiens
aacatgttttaaatt

SEQ ID NO: 51142 - DNA, 15 bp, Homo sapiens
acatgttttaaattc

SEQ ID NO: 51143 - DNA, 15 bp, Homo sapiens
catgttttaaattcc

SEQ ID NO: 51144 - DNA, 15 bp, Homo sapiens
atgttttaaattcca

SEQ ID NO: 51145 - DNA, 15 bp, Homo sapiens
tgttttaaattccag

SEQ ID NO: 51146 - DNA, 15 bp, Homo sapiens
gttttaaattccagt

SEQ ID NO: 51147 - DNA, 15 bp, Homo sapiens
ttttaaattccagta

SEQ ID NO: 51148 - DNA, 15 bp, Homo sapiens
tttaaattccagtaa

SEQ ID NO: 51149 - DNA, 15 bp, Homo sapiens
ttaaattccagtaaa

SEQ ID NO: 51150 - DNA, 15 bp, Homo sapiens
taaattccagtaaag

SEQ ID NO: 51151 - DNA, 15 bp, Homo sapiens
aaattccagtaaagg

SEQ ID NO: 51152 - DNA, 15 bp, Homo sapiens
aattccagtaaaggt

SEQ ID NO: 51153 - DNA, 15 bp, Homo sapiens
attccagtaaaggtt

SEQ ID NO: 51154 - DNA, 15 bp, Homo sapiens
ttccagtaaaggtta

SEQ ID NO: 51155 - DNA, 15 bp, Homo sapiens
tccagtaaaggttat

SEQ ID NO: 51156 - DNA, 15 bp, Homo sapiens
ccagtaaaggttatg

SEQ ID NO: 51157 - DNA, 15 bp, Homo sapiens
cagtaaaggttatgg

SEQ ID NO: 51158 - DNA, 15 bp, Homo sapiens
agtaaaggttatggt

SEQ ID NO: 51159 - DNA, 15 bp, Homo sapiens
gtaaaggttatggtt

SEQ ID NO: 51160 - DNA, 15 bp, Homo sapiens
taaaggttatggtta

SEQ ID NO: 51161 - DNA, 15 bp, Homo sapiens
aaaggttatggttac

SEQ ID NO: 51162 - DNA, 15 bp, Homo sapiens
aaggttatggttaca

SEQ ID NO: 51163 - DNA, 15 bp, Homo sapiens
aggttatggttacat

SEQ ID NO: 51164 - DNA, 15 bp, Homo sapiens
ggttatggttacatt

SEQ ID NO: 51165 - DNA, 15 bp, Homo sapiens
gttatggttacattt

SEQ ID NO: 51166 - DNA, 15 bp, Homo sapiens
ttatggttacatttc

SEQ ID NO: 51167 - DNA, 15 bp, Homo sapiens
tatggttacatttca

SEQ ID NO: 51168 - DNA, 15 bp, Homo sapiens
atggttacatttcaa

SEQ ID NO: 51169 - DNA, 15 bp, Homo sapiens
tggttacatttcaac

SEQ ID NO: 51170 - DNA, 15 bp, Homo sapiens
ggttacatttcaaca

SEQ ID NO: 51171 - DNA, 15 bp, Homo sapiens
gttacatttcaacaa

SEQ ID NO: 51172 - DNA, 15 bp, Homo sapiens
ttacatttcaacaag

SEQ ID NO: 51173 - DNA, 15 bp, Homo sapiens
tacatttcaacaagt

SEQ ID NO: 51174 - DNA, 15 bp, Homo sapiens
acatttcaacaagtg

SEQ ID NO: 51175 - DNA, 15 bp, Homo sapiens
catttcaacaagtgt

SEQ ID NO: 51176 - DNA, 15 bp, Homo sapiens
atttcaacaagtgtc

SEQ ID NO: 51177 - DNA, 15 bp, Homo sapiens
tttcaacaagtgtct

SEQ ID NO: 51178 - DNA, 15 bp, Homo sapiens
ttcaacaagtgtctc

SEQ ID NO: 51179 - DNA, 15 bp, Homo sapiens
tcaacaagtgtctct

SEQ ID NO: 51180 - DNA, 15 bp, Homo sapiens
caacaagtgtctctt

SEQ ID NO: 51181 - DNA, 15 bp, Homo sapiens
aacaagtgtctcttt

SEQ ID NO: 51182 - DNA, 15 bp, Homo sapiens
acaagtgtctctttc

SEQ ID NO: 51183 - DNA, 15 bp, Homo sapiens
caagtgtctctttcc

SEQ ID NO: 51184 - DNA, 15 bp, Homo sapiens
aagtgtctctttcct

SEQ ID NO: 51185 - DNA, 15 bp, Homo sapiens
agtgtctctttcctt

SEQ ID NO: 51186 - DNA, 15 bp, Homo sapiens
gtgtctctttccttt

SEQ ID NO: 51187 - DNA, 15 bp, Homo sapiens
tgtctctttcctttt

SEQ ID NO: 51188 - DNA, 15 bp, Homo sapiens
gtctctttccttttt

SEQ ID NO: 51189 - DNA, 15 bp, Homo sapiens
tctctttcctttttt

SEQ ID NO: 51190 - DNA, 15 bp, Homo sapiens
ctctttccttttttt

SEQ ID NO: 51191 - DNA, 15 bp, Homo sapiens
ctttcctttttttta

SEQ ID NO: 51192 - DNA, 15 bp, Homo sapiens
tttccttttttttac

SEQ ID NO: 51193 - DNA, 15 bp, Homo sapiens
ttccttttttttacc

SEQ ID NO: 51194 - DNA, 15 bp, Homo sapiens
tccttttttttacct

SEQ ID NO: 51195 - DNA, 15 bp, Homo sapiens
ccttttttttacctc

SEQ ID NO: 51196 - DNA, 15 bp, Homo sapiens
cttttttttacctct

SEQ ID NO: 51197 - DNA, 15 bp, Homo sapiens
ttttttttacctctc

SEQ ID NO: 51198 - DNA, 15 bp, Homo sapiens
tttttttacctctcc

SEQ ID NO: 51199 - DNA, 15 bp, Homo sapiens
ttttttacctctcct

SEQ ID NO: 51200 - DNA, 15 bp, Homo sapiens
tttttacctctcctg

SEQ ID NO: 51201 - DNA, 15 bp, Homo sapiens
ttttacctctcctgc

SEQ ID NO: 51202 - DNA, 15 bp, Homo sapiens
tttacctctcctgct

SEQ ID NO: 51203 - DNA, 15 bp, Homo sapiens
ttacctctcctgcta

SEQ ID NO: 51204 - DNA, 15 bp, Homo sapiens
tacctctcctgctaa

SEQ ID NO: 51205 - DNA, 15 bp, Homo sapiens
acctctcctgctaac

SEQ ID NO: 51206 - DNA, 15 bp, Homo sapiens
cctctcctgctaacc

SEQ ID NO: 51207 - DNA, 15 bp, Homo sapiens
ctctcctgctaaccc

SEQ ID NO: 51208 - DNA, 15 bp, Homo sapiens
tctcctgctaaccca

SEQ ID NO: 51209 - DNA, 15 bp, Homo sapiens
ctcctgctaacccag

SEQ ID NO: 51210 - DNA, 15 bp, Homo sapiens
tcctgctaacccaga

SEQ ID NO: 51211 - DNA, 15 bp, Homo sapiens
cctgctaacccagag

SEQ ID NO: 51212 - DNA, 15 bp, Homo sapiens
ctgctaacccagagg

SEQ ID NO: 51213 - DNA, 15 bp, Homo sapiens
tgctaacccagaggt

SEQ ID NO: 51214 - DNA, 15 bp, Homo sapiens
gctaacccagaggta

SEQ ID NO: 51215 - DNA, 15 bp, Homo sapiens
ctaacccagaggtaa

SEQ ID NO: 51216 - DNA, 15 bp, Homo sapiens
taacccagaggtaaa

SEQ ID NO: 51217 - DNA, 15 bp, Homo sapiens
aacccagaggtaaat

SEQ ID NO: 51218 - DNA, 15 bp, Homo sapiens
acccagaggtaaatt

SEQ ID NO: 51219 - DNA, 15 bp, Homo sapiens
cccagaggtaaattt

SEQ ID NO: 51220 - DNA, 15 bp, Homo sapiens
ccagaggtaaatttc

SEQ ID NO: 51221 - DNA, 15 bp, Homo sapiens
cagaggtaaatttcc

SEQ ID NO: 51222 - DNA, 15 bp, Homo sapiens
agaggtaaatttccc

SEQ ID NO: 51223 - DNA, 15 bp, Homo sapiens
gaggtaaatttccca

SEQ ID NO: 51224 - DNA, 15 bp, Homo sapiens
aggtaaatttcccaa

SEQ ID NO: 51225 - DNA, 15 bp, Homo sapiens
ggtaaatttcccaaa

SEQ ID NO: 51226 - DNA, 15 bp, Homo sapiens
gtaaatttcccaaaa

SEQ ID NO: 51227 - DNA, 15 bp, Homo sapiens
taaatttcccaaaaa

SEQ ID NO: 51228 - DNA, 15 bp, Homo sapiens
aaatttcccaaaaaa

SEQ ID NO: 51229 - DNA, 15 bp, Homo sapiens
aatttcccaaaaaaa

SEQ ID NO: 51230 - DNA, 15 bp, Homo sapiens
atttcccaaaaaaaa

SEQ ID NO: 51231 - DNA, 15 bp, Homo sapiens
tttcccaaaaaaaaa

SEQ ID NO: 51232 - DNA, 15 bp, Homo sapiens
ttcccaaaaaaaaaa

SEQ ID NO: 51233 - DNA, 15 bp, Homo sapiens
tcccaaaaaaaaaaa

SEQ ID NO: 51234 - DNA, 15 bp, Homo sapiens
cccaaaaaaaaaaaa

SEQ ID NO: 51235 - DNA, 15 bp, Homo sapiens
aaaaaaaaagtctta

SEQ ID NO: 51236 - DNA, 15 bp, Homo sapiens
aaaaaaaagtcttaa

SEQ ID NO: 51237 - DNA, 15 bp, Homo sapiens
aaaaaaagtcttaag

SEQ ID NO: 51238 - DNA, 15 bp, Homo sapiens
aaaaaagtcttaagc

SEQ ID NO: 51239 - DNA, 15 bp, Homo sapiens
aaaaagtcttaagca

SEQ ID NO: 51240 - DNA, 15 bp, Homo sapiens
aaaagtcttaagcaa

SEQ ID NO: 51241 - DNA, 15 bp, Homo sapiens
aaagtcttaagcaag

SEQ ID NO: 51242 - DNA, 15 bp, Homo sapiens
aagtcttaagcaagg

SEQ ID NO: 51243 - DNA, 15 bp, Homo sapiens
agtcttaagcaaggc

SEQ ID NO: 51244 - DNA, 15 bp, Homo sapiens
gtcttaagcaaggca

SEQ ID NO: 51245 - DNA, 15 bp, Homo sapiens
tcttaagcaaggcat

SEQ ID NO: 51246 - DNA, 15 bp, Homo sapiens
cttaagcaaggcatt

SEQ ID NO: 51247 - DNA, 15 bp, Homo sapiens
ttaagcaaggcattt

SEQ ID NO: 51248 - DNA, 15 bp, Homo sapiens
taagcaaggcatttg

SEQ ID NO: 51249 - DNA, 15 bp, Homo sapiens
aagcaaggcatttgc

SEQ ID NO: 51250 - DNA, 15 bp, Homo sapiens
agcaaggcatttgca

SEQ ID NO: 51251 - DNA, 15 bp, Homo sapiens
gcaaggcatttgcaa

SEQ ID NO: 51252 - DNA, 15 bp, Homo sapiens
caaggcatttgcaaa

SEQ ID NO: 51253 - DNA, 15 bp, Homo sapiens
aaggcatttgcaaaa

SEQ ID NO: 51254 - DNA, 15 bp, Homo sapiens
aggcatttgcaaaat

SEQ ID NO: 51255 - DNA, 15 bp, Homo sapiens
ggcatttgcaaaatc

SEQ ID NO: 51256 - DNA, 15 bp, Homo sapiens
gcatttgcaaaatca

SEQ ID NO: 51257 - DNA, 15 bp, Homo sapiens
catttgcaaaatcag

SEQ ID NO: 51258 - DNA, 15 bp, Homo sapiens
atttgcaaaatcaga

SEQ ID NO: 51259 - DNA, 15 bp, Homo sapiens
tttgcaaaatcagaa

SEQ ID NO: 51260 - DNA, 15 bp, Homo sapiens
ttgcaaaatcagaaa

SEQ ID NO: 51261 - DNA, 15 bp, Homo sapiens
tgcaaaatcagaaaa

SEQ ID NO: 51262 - DNA, 15 bp, Homo sapiens
gcaaaatcagaaaac

SEQ ID NO: 51263 - DNA, 15 bp, Homo sapiens
caaaatcagaaaaca

SEQ ID NO: 51264 - DNA, 15 bp, Homo sapiens
aaaatcagaaaacag

SEQ ID NO: 51265 - DNA, 15 bp, Homo sapiens
aaatcagaaaacagg

SEQ ID NO: 51266 - DNA, 15 bp, Homo sapiens
aatcagaaaacagga

SEQ ID NO: 51267 - DNA, 15 bp, Homo sapiens
atcagaaaacaggaa

SEQ ID NO: 51268 - DNA, 15 bp, Homo sapiens
tcagaaaacaggaac

SEQ ID NO: 51269 - DNA, 15 bp, Homo sapiens
cagaaaacaggaaca

SEQ ID NO: 51270 - DNA, 15 bp, Homo sapiens
agaaaacaggaacag

SEQ ID NO: 51271 - DNA, 15 bp, Homo sapiens
gaaaacaggaacagg

SEQ ID NO: 51272 - DNA, 15 bp, Homo sapiens
aaaacaggaacagga

SEQ ID NO: 51273 - DNA, 15 bp, Homo sapiens
aaacaggaacaggag

SEQ ID NO: 51274 - DNA, 15 bp, Homo sapiens
aacaggaacaggagt

SEQ ID NO: 51275 - DNA, 15 bp, Homo sapiens
acaggaacaggagtt

SEQ ID NO: 51276 - DNA, 15 bp, Homo sapiens
caggaacaggagttt

SEQ ID NO: 51277 - DNA, 15 bp, Homo sapiens
aggaacaggagttta

SEQ ID NO: 51278 - DNA, 15 bp, Homo sapiens
ggaacaggagtttag

SEQ ID NO: 51279 - DNA, 15 bp, Homo sapiens
gaacaggagtttagt

SEQ ID NO: 51280 - DNA, 15 bp, Homo sapiens
aacaggagtttagtg

SEQ ID NO: 51281 - DNA, 15 bp, Homo sapiens
acaggagtttagtga

SEQ ID NO: 51282 - DNA, 15 bp, Homo sapiens
caggagtttagtgat

SEQ ID NO: 51283 - DNA, 15 bp, Homo sapiens
aggagtttagtgatt

SEQ ID NO: 51284 - DNA, 15 bp, Homo sapiens
ggagtttagtgattg

SEQ ID NO: 51285 - DNA, 15 bp, Homo sapiens
gagtttagtgattgt

SEQ ID NO: 51286 - DNA, 15 bp, Homo sapiens
agtttagtgattgtt

SEQ ID NO: 51287 - DNA, 15 bp, Homo sapiens
gtttagtgattgttt

SEQ ID NO: 51288 - DNA, 15 bp, Homo sapiens
tttagtgattgtttt

SEQ ID NO: 51289 - DNA, 15 bp, Homo sapiens
ttagtgattgttttt

SEQ ID NO: 51290 - DNA, 15 bp, Homo sapiens
tagtgattgttttta

SEQ ID NO: 51291 - DNA, 15 bp, Homo sapiens
agtgattgtttttaa

SEQ ID NO: 51292 - DNA, 15 bp, Homo sapiens
gtgattgtttttaaa

SEQ ID NO: 51293 - DNA, 15 bp, Homo sapiens
tgattgtttttaaaa

SEQ ID NO: 51294 - DNA, 15 bp, Homo sapiens
gattgtttttaaaag

SEQ ID NO: 51295 - DNA, 15 bp, Homo sapiens
attgtttttaaaagg

SEQ ID NO: 51296 - DNA, 15 bp, Homo sapiens
ttgtttttaaaaggt

SEQ ID NO: 51297 - DNA, 15 bp, Homo sapiens
tgtttttaaaaggtg

SEQ ID NO: 51298 - DNA, 15 bp, Homo sapiens
gtttttaaaaggtgc

SEQ ID NO: 51299 - DNA, 15 bp, Homo sapiens
tttttaaaaggtgct

SEQ ID NO: 51300 - DNA, 15 bp, Homo sapiens
ttttaaaaggtgctg

SEQ ID NO: 51301 - DNA, 15 bp, Homo sapiens
tttaaaaggtgctgt

SEQ ID NO: 51302 - DNA, 15 bp, Homo sapiens
ttaaaaggtgctgtt

SEQ ID NO: 51303 - DNA, 15 bp, Homo sapiens
taaaaggtgctgttc

SEQ ID NO: 51304 - DNA, 15 bp, Homo sapiens
aaaaggtgctgttcc

SEQ ID NO: 51305 - DNA, 15 bp, Homo sapiens
aaaggtgctgttccc

SEQ ID NO: 51306 - DNA, 15 bp, Homo sapiens
aaggtgctgttccca

SEQ ID NO: 51307 - DNA, 15 bp, Homo sapiens
aggtgctgttcccag

SEQ ID NO: 51308 - DNA, 15 bp, Homo sapiens
ggtgctgttcccagg

SEQ ID NO: 51309 - DNA, 15 bp, Homo sapiens
gtgctgttcccaggg

SEQ ID NO: 51310 - DNA, 15 bp, Homo sapiens
tgctgttcccagggt

SEQ ID NO: 51311 - DNA, 15 bp, Homo sapiens
gctgttcccagggtc

SEQ ID NO: 51312 - DNA, 15 bp, Homo sapiens
ctgttcccagggtca

SEQ ID NO: 51313 - DNA, 15 bp, Homo sapiens
tgttcccagggtcaa

SEQ ID NO: 51314 - DNA, 15 bp, Homo sapiens
gttcccagggtcaaa

SEQ ID NO: 51315 - DNA, 15 bp, Homo sapiens
ttcccagggtcaaaa

SEQ ID NO: 51316 - DNA, 15 bp, Homo sapiens
tcccagggtcaaaac

SEQ ID NO: 51317 - DNA, 15 bp, Homo sapiens
cccagggtcaaaact

SEQ ID NO: 51318 - DNA, 15 bp, Homo sapiens
ccagggtcaaaactt

SEQ ID NO: 51319 - DNA, 15 bp, Homo sapiens
cagggtcaaaacttt

SEQ ID NO: 51320 - DNA, 15 bp, Homo sapiens
agggtcaaaactttg

SEQ ID NO: 51321 - DNA, 15 bp, Homo sapiens
gggtcaaaactttgt

SEQ ID NO: 51322 - DNA, 15 bp, Homo sapiens
ggtcaaaactttgtg

SEQ ID NO: 51323 - DNA, 15 bp, Homo sapiens
gtcaaaactttgtgg

SEQ ID NO: 51324 - DNA, 15 bp, Homo sapiens
tcaaaactttgtggt

SEQ ID NO: 51325 - DNA, 15 bp, Homo sapiens
caaaactttgtggtg

SEQ ID NO: 51326 - DNA, 15 bp, Homo sapiens
aaaactttgtggtgt

SEQ ID NO: 51327 - DNA, 15 bp, Homo sapiens
aaactttgtggtgta

SEQ ID NO: 51328 - DNA, 15 bp, Homo sapiens
aactttgtggtgtaa

SEQ ID NO: 51329 - DNA, 15 bp, Homo sapiens
actttgtggtgtaat

SEQ ID NO: 51330 - DNA, 15 bp, Homo sapiens
ctttgtggtgtaatt

SEQ ID NO: 51331 - DNA, 15 bp, Homo sapiens
tttgtggtgtaattt

SEQ ID NO: 51332 - DNA, 15 bp, Homo sapiens
ttgtggtgtaatttc

SEQ ID NO: 51333 - DNA, 15 bp, Homo sapiens
tgtggtgtaatttca

SEQ ID NO: 51334 - DNA, 15 bp, Homo sapiens
gtggtgtaatttcaa

SEQ ID NO: 51335 - DNA, 15 bp, Homo sapiens
tggtgtaatttcaac

SEQ ID NO: 51336 - DNA, 15 bp, Homo sapiens
ggtgtaatttcaaca

SEQ ID NO: 51337 - DNA, 15 bp, Homo sapiens
gtgtaatttcaacat

SEQ ID NO: 51338 - DNA, 15 bp, Homo sapiens
tgtaatttcaacatg

SEQ ID NO: 51339 - DNA, 15 bp, Homo sapiens
gtaatttcaacatgc

SEQ ID NO: 51340 - DNA, 15 bp, Homo sapiens
taatttcaacatgct

SEQ ID NO: 51341 - DNA, 15 bp, Homo sapiens
aatttcaacatgcta

SEQ ID NO: 51342 - DNA, 15 bp, Homo sapiens
atttcaacatgctat

SEQ ID NO: 51343 - DNA, 15 bp, Homo sapiens
tttcaacatgctatg

SEQ ID NO: 51344 - DNA, 15 bp, Homo sapiens
ttcaacatgctatgt

SEQ ID NO: 51345 - DNA, 15 bp, Homo sapiens
tcaacatgctatgtt

SEQ ID NO: 51346 - DNA, 15 bp, Homo sapiens
caacatgctatgtta

SEQ ID NO: 51347 - DNA, 15 bp, Homo sapiens
aacatgctatgttac

SEQ ID NO: 51348 - DNA, 15 bp, Homo sapiens
acatgctatgttacc

SEQ ID NO: 51349 - DNA, 15 bp, Homo sapiens
catgctatgttacct

SEQ ID NO: 51350 - DNA, 15 bp, Homo sapiens
atgctatgttaccta

SEQ ID NO: 51351 - DNA, 15 bp, Homo sapiens
tgctatgttacctat

SEQ ID NO: 51352 - DNA, 15 bp, Homo sapiens
gctatgttacctatt

SEQ ID NO: 51353 - DNA, 15 bp, Homo sapiens
ctatgttacctatta

SEQ ID NO: 51354 - DNA, 15 bp, Homo sapiens
tatgttacctattat

SEQ ID NO: 51355 - DNA, 15 bp, Homo sapiens
atgttacctattatg

SEQ ID NO: 51356 - DNA, 15 bp, Homo sapiens
tgttacctattatgt

SEQ ID NO: 51357 - DNA, 15 bp, Homo sapiens
gttacctattatgtg

SEQ ID NO: 51358 - DNA, 15 bp, Homo sapiens
ttacctattatgtgt

SEQ ID NO: 51359 - DNA, 15 bp, Homo sapiens
tacctattatgtgta

SEQ ID NO: 51360 - DNA, 15 bp, Homo sapiens
acctattatgtgtaa

SEQ ID NO: 51361 - DNA, 15 bp, Homo sapiens
cctattatgtgtaat

SEQ ID NO: 51362 - DNA, 15 bp, Homo sapiens
ctattatgtgtaatg

SEQ ID NO: 51363 - DNA, 15 bp, Homo sapiens
tattatgtgtaatgc

SEQ ID NO: 51364 - DNA, 15 bp, Homo sapiens
attatgtgtaatgcc

SEQ ID NO: 51365 - DNA, 15 bp, Homo sapiens
ttatgtgtaatgcct

SEQ ID NO: 51366 - DNA, 15 bp, Homo sapiens
tatgtgtaatgcctt

SEQ ID NO: 51367 - DNA, 15 bp, Homo sapiens
atgtgtaatgccttg

SEQ ID NO: 51368 - DNA, 15 bp, Homo sapiens
tgtgtaatgccttga

SEQ ID NO: 51369 - DNA, 15 bp, Homo sapiens
gtgtaatgccttgaa

SEQ ID NO: 51370 - DNA, 15 bp, Homo sapiens
tgtaatgccttgaaa

SEQ ID NO: 51371 - DNA, 15 bp, Homo sapiens
gtaatgccttgaaac

SEQ ID NO: 51372 - DNA, 15 bp, Homo sapiens
taatgccttgaaacg

SEQ ID NO: 51373 - DNA, 15 bp, Homo sapiens
aatgccttgaaacgc

SEQ ID NO: 51374 - DNA, 15 bp, Homo sapiens
atgccttgaaacgct

SEQ ID NO: 51375 - DNA, 15 bp, Homo sapiens
tgccttgaaacgcta

SEQ ID NO: 51376 - DNA, 15 bp, Homo sapiens
gccttgaaacgctac

SEQ ID NO: 51377 - DNA, 15 bp, Homo sapiens
ccttgaaacgctaca

SEQ ID NO: 51378 - DNA, 15 bp, Homo sapiens
cttgaaacgctacat

SEQ ID NO: 51379 - DNA, 15 bp, Homo sapiens
ttgaaacgctacatg

SEQ ID NO: 51380 - DNA, 15 bp, Homo sapiens
tgaaacgctacatgc

SEQ ID NO: 51381 - DNA, 15 bp, Homo sapiens
gaaacgctacatgcc

SEQ ID NO: 51382 - DNA, 15 bp, Homo sapiens
aaacgctacatgcca

SEQ ID NO: 51383 - DNA, 15 bp, Homo sapiens
aacgctacatgccat

SEQ ID NO: 51384 - DNA, 15 bp, Homo sapiens
acgctacatgccata

SEQ ID NO: 51385 - DNA, 15 bp, Homo sapiens
cgctacatgccataa

SEQ ID NO: 51386 - DNA, 15 bp, Homo sapiens
gctacatgccataac

SEQ ID NO: 51387 - DNA, 15 bp, Homo sapiens
ctacatgccataaca

SEQ ID NO: 51388 - DNA, 15 bp, Homo sapiens
tacatgccataacat

SEQ ID NO: 51389 - DNA, 15 bp, Homo sapiens
acatgccataacatc

SEQ ID NO: 51390 - DNA, 15 bp, Homo sapiens
catgccataacatca

SEQ ID NO: 51391 - DNA, 15 bp, Homo sapiens
atgccataacatcag

SEQ ID NO: 51392 - DNA, 15 bp, Homo sapiens
tgccataacatcaga

SEQ ID NO: 51393 - DNA, 15 bp, Homo sapiens
gccataacatcagaa

SEQ ID NO: 51394 - DNA, 15 bp, Homo sapiens
ccataacatcagaaa

SEQ ID NO: 51395 - DNA, 15 bp, Homo sapiens
cataacatcagaaat

SEQ ID NO: 51396 - DNA, 15 bp, Homo sapiens
ataacatcagaaatc

SEQ ID NO: 51397 - DNA, 15 bp, Homo sapiens
taacatcagaaatct

SEQ ID NO: 51398 - DNA, 15 bp, Homo sapiens
aacatcagaaatctc

SEQ ID NO: 51399 - DNA, 15 bp, Homo sapiens
acatcagaaatctcc

SEQ ID NO: 51400 - DNA, 15 bp, Homo sapiens
catcagaaatctcca

SEQ ID NO: 51401 - DNA, 15 bp, Homo sapiens
atcagaaatctccaa

SEQ ID NO: 51402 - DNA, 15 bp, Homo sapiens
tcagaaatctccaac

SEQ ID NO: 51403 - DNA, 15 bp, Homo sapiens
cagaaatctccaacc

SEQ ID NO: 51404 - DNA, 15 bp, Homo sapiens
agaaatctccaacct

SEQ ID NO: 51405 - DNA, 15 bp, Homo sapiens
gaaatctccaaccta

SEQ ID NO: 51406 - DNA, 15 bp, Homo sapiens
aaatctccaacctaa

SEQ ID NO: 51407 - DNA, 15 bp, Homo sapiens
aatctccaacctaaa

SEQ ID NO: 51408 - DNA, 15 bp, Homo sapiens
atctccaacctaaaa

SEQ ID NO: 51409 - DNA, 15 bp, Homo sapiens
tctccaacctaaaaa

SEQ ID NO: 51410 - DNA, 15 bp, Homo sapiens
ctccaacctaaaaat

SEQ ID NO: 51411 - DNA, 15 bp, Homo sapiens
tccaacctaaaaatt

SEQ ID NO: 51412 - DNA, 15 bp, Homo sapiens
ccaacctaaaaatta

SEQ ID NO: 51413 - DNA, 15 bp, Homo sapiens
caacctaaaaattat

SEQ ID NO: 51414 - DNA, 15 bp, Homo sapiens
aacctaaaaattatg

SEQ ID NO: 51415 - DNA, 15 bp, Homo sapiens
acctaaaaattatgt

SEQ ID NO: 51416 - DNA, 15 bp, Homo sapiens
cctaaaaattatgtt

SEQ ID NO: 51417 - DNA, 15 bp, Homo sapiens
ctaaaaattatgttg

SEQ ID NO: 51418 - DNA, 15 bp, Homo sapiens
taaaaattatgttgc

SEQ ID NO: 51419 - DNA, 15 bp, Homo sapiens
aaaaattatgttgca

SEQ ID NO: 51420 - DNA, 15 bp, Homo sapiens
aaaattatgttgcat

SEQ ID NO: 51421 - DNA, 15 bp, Homo sapiens
aaattatgttgcatg

SEQ ID NO: 51422 - DNA, 15 bp, Homo sapiens
aattatgttgcatga

SEQ ID NO: 51423 - DNA, 15 bp, Homo sapiens
attatgttgcatgag

SEQ ID NO: 51424 - DNA, 15 bp, Homo sapiens
ttatgttgcatgaga

SEQ ID NO: 51425 - DNA, 15 bp, Homo sapiens
tatgttgcatgagat

SEQ ID NO: 51426 - DNA, 15 bp, Homo sapiens
atgttgcatgagata

SEQ ID NO: 51427 - DNA, 15 bp, Homo sapiens
tgttgcatgagataa

SEQ ID NO: 51428 - DNA, 15 bp, Homo sapiens
gttgcatgagataag

SEQ ID NO: 51429 - DNA, 15 bp, Homo sapiens
ttgcatgagataagc

SEQ ID NO: 51430 - DNA, 15 bp, Homo sapiens
tgcatgagataagca

SEQ ID NO: 51431 - DNA, 15 bp, Homo sapiens
gcatgagataagcat

SEQ ID NO: 51432 - DNA, 15 bp, Homo sapiens
catgagataagcatt

SEQ ID NO: 51433 - DNA, 15 bp, Homo sapiens
atgagataagcattg

SEQ ID NO: 51434 - DNA, 15 bp, Homo sapiens
tgagataagcattga

SEQ ID NO: 51435 - DNA, 15 bp, Homo sapiens
gagataagcattgaa

SEQ ID NO: 51436 - DNA, 15 bp, Homo sapiens
agataagcattgaag

SEQ ID NO: 51437 - DNA, 15 bp, Homo sapiens
gataagcattgaagg

SEQ ID NO: 51438 - DNA, 15 bp, Homo sapiens
ataagcattgaaggc

SEQ ID NO: 51439 - DNA, 15 bp, Homo sapiens
taagcattgaaggca

SEQ ID NO: 51440 - DNA, 15 bp, Homo sapiens
aagcattgaaggcac

SEQ ID NO: 51441 - DNA, 15 bp, Homo sapiens
agcattgaaggcaca

SEQ ID NO: 51442 - DNA, 15 bp, Homo sapiens
gcattgaaggcacac

SEQ ID NO: 51443 - DNA, 15 bp, Homo sapiens
cattgaaggcacaca

SEQ ID NO: 51444 - DNA, 15 bp, Homo sapiens
attgaaggcacacac

SEQ ID NO: 51445 - DNA, 15 bp, Homo sapiens
ttgaaggcacacacg

SEQ ID NO: 51446 - DNA, 15 bp, Homo sapiens
tgaaggcacacacgt

SEQ ID NO: 51447 - DNA, 15 bp, Homo sapiens
gaaggcacacacgtt

SEQ ID NO: 51448 - DNA, 15 bp, Homo sapiens
aaggcacacacgttc

SEQ ID NO: 51449 - DNA, 15 bp, Homo sapiens
aggcacacacgttca

SEQ ID NO: 51450 - DNA, 15 bp, Homo sapiens
ggcacacacgttcat

SEQ ID NO: 51451 - DNA, 15 bp, Homo sapiens
gcacacacgttcata

SEQ ID NO: 51452 - DNA, 15 bp, Homo sapiens
cacacacgttcatac

SEQ ID NO: 51453 - DNA, 15 bp, Homo sapiens
acacacgttcataca

SEQ ID NO: 51454 - DNA, 15 bp, Homo sapiens
cacacgttcatacaa

SEQ ID NO: 51455 - DNA, 15 bp, Homo sapiens
acacgttcatacaaa

SEQ ID NO: 51456 - DNA, 15 bp, Homo sapiens
cacgttcatacaaat

SEQ ID NO: 51457 - DNA, 15 bp, Homo sapiens
acgttcatacaaatt

SEQ ID NO: 51458 - DNA, 15 bp, Homo sapiens
cgttcatacaaatta

SEQ ID NO: 51459 - DNA, 15 bp, Homo sapiens
gttcatacaaattaa

SEQ ID NO: 51460 - DNA, 15 bp, Homo sapiens
ttcatacaaattaaa

SEQ ID NO: 51461 - DNA, 15 bp, Homo sapiens
tcatacaaattaaat

SEQ ID NO: 51462 - DNA, 15 bp, Homo sapiens
catacaaattaaatc

SEQ ID NO: 51463 - DNA, 15 bp, Homo sapiens
atacaaattaaatct

SEQ ID NO: 51464 - DNA, 15 bp, Homo sapiens
tacaaattaaatctg

SEQ ID NO: 51465 - DNA, 15 bp, Homo sapiens
acaaattaaatctgt

SEQ ID NO: 51466 - DNA, 15 bp, Homo sapiens
caaattaaatctgta

SEQ ID NO: 51467 - DNA, 15 bp, Homo sapiens
aaattaaatctgtaa

SEQ ID NO: 51468 - DNA, 15 bp, Homo sapiens
aattaaatctgtaat

SEQ ID NO: 51469 - DNA, 15 bp, Homo sapiens
attaaatctgtaatt

SEQ ID NO: 51470 - DNA, 15 bp, Homo sapiens
ttaaatctgtaatta

SEQ ID NO: 51471 - DNA, 15 bp, Homo sapiens
taaatctgtaattat

SEQ ID NO: 51472 - DNA, 15 bp, Homo sapiens
aaatctgtaattatg

SEQ ID NO: 51473 - DNA, 15 bp, Homo sapiens
aatctgtaattatgc

SEQ ID NO: 51474 - DNA, 15 bp, Homo sapiens
atctgtaattatgcc

SEQ ID NO: 51475 - DNA, 15 bp, Homo sapiens
tctgtaattatgcct

SEQ ID NO: 51476 - DNA, 15 bp, Homo sapiens
ctgtaattatgcctc

SEQ ID NO: 51477 - DNA, 15 bp, Homo sapiens
tgtaattatgcctca

SEQ ID NO: 51478 - DNA, 15 bp, Homo sapiens
gtaattatgcctcaa

SEQ ID NO: 51479 - DNA, 15 bp, Homo sapiens
taattatgcctcaat

SEQ ID NO: 51480 - DNA, 15 bp, Homo sapiens
aattatgcctcaata

SEQ ID NO: 51481 - DNA, 15 bp, Homo sapiens
attatgcctcaataa

SEQ ID NO: 51482 - DNA, 15 bp, Homo sapiens
ttatgcctcaataag

SEQ ID NO: 51483 - DNA, 15 bp, Homo sapiens
tatgcctcaataagt

SEQ ID NO: 51484 - DNA, 15 bp, Homo sapiens
atgcctcaataagtt

SEQ ID NO: 51485 - DNA, 15 bp, Homo sapiens
tgcctcaataagtta

SEQ ID NO: 51486 - DNA, 15 bp, Homo sapiens
gcctcaataagttaa

SEQ ID NO: 51487 - DNA, 15 bp, Homo sapiens
cctcaataagttaaa

SEQ ID NO: 51488 - DNA, 15 bp, Homo sapiens
ctcaataagttaaaa

SEQ ID NO: 51489 - DNA, 15 bp, Homo sapiens
tcaataagttaaaat

SEQ ID NO: 51490 - DNA, 15 bp, Homo sapiens
caataagttaaaatg

SEQ ID NO: 51491 - DNA, 15 bp, Homo sapiens
aataagttaaaatgt

SEQ ID NO: 51492 - DNA, 15 bp, Homo sapiens
ataagttaaaatgta

SEQ ID NO: 51493 - DNA, 15 bp, Homo sapiens
taagttaaaatgtaa

SEQ ID NO: 51494 - DNA, 15 bp, Homo sapiens
aagttaaaatgtaaa

SEQ ID NO: 51495 - DNA, 15 bp, Homo sapiens
agttaaaatgtaaag

SEQ ID NO: 51496 - DNA, 15 bp, Homo sapiens
gttaaaatgtaaaga

SEQ ID NO: 51497 - DNA, 15 bp, Homo sapiens
ttaaaatgtaaagac

SEQ ID NO: 51498 - DNA, 15 bp, Homo sapiens
taaaatgtaaagaca

SEQ ID NO: 51499 - DNA, 15 bp, Homo sapiens
aaaatgtaaagacat

SEQ ID NO: 51500 - DNA, 15 bp, Homo sapiens
aaatgtaaagacata

SEQ ID NO: 51501 - DNA, 15 bp, Homo sapiens
aatgtaaagacatat

SEQ ID NO: 51502 - DNA, 15 bp, Homo sapiens
atgtaaagacatatc

SEQ ID NO: 51503 - DNA, 15 bp, Homo sapiens
tgtaaagacatatca

SEQ ID NO: 51504 - DNA, 15 bp, Homo sapiens
gtaaagacatatcaa

SEQ ID NO: 51505 - DNA, 15 bp, Homo sapiens
taaagacatatcaaa

SEQ ID NO: 51506 - DNA, 15 bp, Homo sapiens
aaagacatatcaaat

SEQ ID NO: 51507 - DNA, 15 bp, Homo sapiens
aagacatatcaaatt

SEQ ID NO: 51508 - DNA, 15 bp, Homo sapiens
agacatatcaaattg

SEQ ID NO: 51509 - DNA, 15 bp, Homo sapiens
gacatatcaaattgt

SEQ ID NO: 51510 - DNA, 15 bp, Homo sapiens
acatatcaaattgta

SEQ ID NO: 51511 - DNA, 15 bp, Homo sapiens
catatcaaattgtaa

SEQ ID NO: 51512 - DNA, 15 bp, Homo sapiens
atatcaaattgtaag

SEQ ID NO: 51513 - DNA, 15 bp, Homo sapiens
tatcaaattgtaaga

SEQ ID NO: 51514 - DNA, 15 bp, Homo sapiens
atcaaattgtaagac

SEQ ID NO: 51515 - DNA, 15 bp, Homo sapiens
tcaaattgtaagacc

SEQ ID NO: 51516 - DNA, 15 bp, Homo sapiens
caaattgtaagacca

SEQ ID NO: 51517 - DNA, 15 bp, Homo sapiens
aaattgtaagaccaa

SEQ ID NO: 51518 - DNA, 15 bp, Homo sapiens
aattgtaagaccaaa

SEQ ID NO: 51519 - DNA, 15 bp, Homo sapiens
attgtaagaccaaaa

SEQ ID NO: 51520 - DNA, 15 bp, Homo sapiens
ttgtaagaccaaaat

SEQ ID NO: 51521 - DNA, 15 bp, Homo sapiens
tgtaagaccaaaatg

SEQ ID NO: 51522 - DNA, 15 bp, Homo sapiens
gtaagaccaaaatgg

SEQ ID NO: 51523 - DNA, 15 bp, Homo sapiens
taagaccaaaatggc

SEQ ID NO: 51524 - DNA, 15 bp, Homo sapiens
aagaccaaaatggct

SEQ ID NO: 51525 - DNA, 15 bp, Homo sapiens
agaccaaaatggctt

SEQ ID NO: 51526 - DNA, 15 bp, Homo sapiens
gaccaaaatggcttt

SEQ ID NO: 51527 - DNA, 15 bp, Homo sapiens
accaaaatggctttt

SEQ ID NO: 51528 - DNA, 15 bp, Homo sapiens
ccaaaatggcttttg

SEQ ID NO: 51529 - DNA, 15 bp, Homo sapiens
caaaatggcttttga

SEQ ID NO: 51530 - DNA, 15 bp, Homo sapiens
aaaatggcttttgac

SEQ ID NO: 51531 - DNA, 15 bp, Homo sapiens
aaatggcttttgacc

SEQ ID NO: 51532 - DNA, 15 bp, Homo sapiens
aatggcttttgacct

SEQ ID NO: 51533 - DNA, 15 bp, Homo sapiens
atggcttttgacctt

SEQ ID NO: 51534 - DNA, 15 bp, Homo sapiens
tggcttttgacctta

SEQ ID NO: 51535 - DNA, 15 bp, Homo sapiens
ggcttttgaccttac

SEQ ID NO: 51536 - DNA, 15 bp, Homo sapiens
gcttttgaccttaca

SEQ ID NO: 51537 - DNA, 15 bp, Homo sapiens
cttttgaccttacaa

SEQ ID NO: 51538 - DNA, 15 bp, Homo sapiens
ttttgaccttacaac

SEQ ID NO: 51539 - DNA, 15 bp, Homo sapiens
tttgaccttacaaca

SEQ ID NO: 51540 - DNA, 15 bp, Homo sapiens
ttgaccttacaacaa

SEQ ID NO: 51541 - DNA, 15 bp, Homo sapiens
tgaccttacaacaaa

SEQ ID NO: 51542 - DNA, 15 bp, Homo sapiens
gaccttacaacaaac

SEQ ID NO: 51543 - DNA, 15 bp, Homo sapiens
accttacaacaaact

SEQ ID NO: 51544 - DNA, 15 bp, Homo sapiens
ccttacaacaaactc

SEQ ID NO: 51545 - DNA, 15 bp, Homo sapiens
cttacaacaaactca

SEQ ID NO: 51546 - DNA, 15 bp, Homo sapiens
ttacaacaaactcat

SEQ ID NO: 51547 - DNA, 15 bp, Homo sapiens
tacaacaaactcata

SEQ ID NO: 51548 - DNA, 15 bp, Homo sapiens
acaacaaactcatat

SEQ ID NO: 51549 - DNA, 15 bp, Homo sapiens
caacaaactcatata

SEQ ID NO: 51550 - DNA, 15 bp, Homo sapiens
aacaaactcatataa

SEQ ID NO: 51551 - DNA, 15 bp, Homo sapiens
acaaactcatataaa

SEQ ID NO: 51552 - DNA, 15 bp, Homo sapiens
caaactcatataaaa

SEQ ID NO: 51553 - DNA, 15 bp, Homo sapiens
aaactcatataaaaa

SEQ ID NO: 51554 - DNA, 15 bp, Homo sapiens
aactcatataaaaat

SEQ ID NO: 51555 - DNA, 15 bp, Homo sapiens
actcatataaaaata

SEQ ID NO: 51556 - DNA, 15 bp, Homo sapiens
ctcatataaaaatag

SEQ ID NO: 51557 - DNA, 15 bp, Homo sapiens
tcatataaaaataga

SEQ ID NO: 51558 - DNA, 15 bp, Homo sapiens
catataaaaatagat

SEQ ID NO: 51559 - DNA, 15 bp, Homo sapiens
atataaaaatagatt

SEQ ID NO: 51560 - DNA, 15 bp, Homo sapiens
tataaaaatagattt

SEQ ID NO: 51561 - DNA, 15 bp, Homo sapiens
ataaaaatagatttt

SEQ ID NO: 51562 - DNA, 15 bp, Homo sapiens
taaaaatagattttt

SEQ ID NO: 51563 - DNA, 15 bp, Homo sapiens
aaaaatagatttttc

SEQ ID NO: 51564 - DNA, 15 bp, Homo sapiens
aaaatagatttttcc

SEQ ID NO: 51565 - DNA, 15 bp, Homo sapiens
aaatagatttttcca

SEQ ID NO: 51566 - DNA, 15 bp, Homo sapiens
aatagatttttccat

SEQ ID NO: 51567 - DNA, 15 bp, Homo sapiens
atagatttttccata

SEQ ID NO: 51568 - DNA, 15 bp, Homo sapiens
tagatttttccataa

SEQ ID NO: 51569 - DNA, 15 bp, Homo sapiens
agatttttccataat

SEQ ID NO: 51570 - DNA, 15 bp, Homo sapiens
gatttttccataata

SEQ ID NO: 51571 - DNA, 15 bp, Homo sapiens
atttttccataataa

SEQ ID NO: 51572 - DNA, 15 bp, Homo sapiens
tttttccataataat

SEQ ID NO: 51573 - DNA, 15 bp, Homo sapiens
ttttccataataata

SEQ ID NO: 51574 - DNA, 15 bp, Homo sapiens
tttccataataataa

SEQ ID NO: 51575 - DNA, 15 bp, Homo sapiens
ttccataataataaa

SEQ ID NO: 51576 - DNA, 15 bp, Homo sapiens
tccataataataaag

SEQ ID NO: 51577 - DNA, 15 bp, Homo sapiens
ccataataataaagg

SEQ ID NO: 51578 - DNA, 15 bp, Homo sapiens
cataataataaaggg

SEQ ID NO: 51579 - DNA, 15 bp, Homo sapiens
ataataataaagggg

SEQ ID NO: 51580 - DNA, 15 bp, Homo sapiens
taataataaagggga

SEQ ID NO: 51581 - DNA, 15 bp, Homo sapiens
aataataaaggggag

SEQ ID NO: 51582 - DNA, 15 bp, Homo sapiens
ataataaaggggaga

SEQ ID NO: 51583 - DNA, 15 bp, Homo sapiens
taataaaggggagag

SEQ ID NO: 51584 - DNA, 15 bp, Homo sapiens
aataaaggggagaga

SEQ ID NO: 51585 - DNA, 15 bp, Homo sapiens
ataaaggggagagag

SEQ ID NO: 51586 - DNA, 15 bp, Homo sapiens
taaaggggagagaga

SEQ ID NO: 51587 - DNA, 15 bp, Homo sapiens
aaaggggagagagag

SEQ ID NO: 51588 - DNA, 15 bp, Homo sapiens
aaggggagagagaga

SEQ ID NO: 51589 - DNA, 15 bp, Homo sapiens
aggggagagagagat

SEQ ID NO: 51590 - DNA, 15 bp, Homo sapiens
ggggagagagagatt

SEQ ID NO: 51591 - DNA, 15 bp, Homo sapiens
gggagagagagattt

SEQ ID NO: 51592 - DNA, 15 bp, Homo sapiens
ggagagagagatttt

SEQ ID NO: 51593 - DNA, 15 bp, Homo sapiens
gagagagagattttg

SEQ ID NO: 51594 - DNA, 15 bp, Homo sapiens
agagagagattttgc

SEQ ID NO: 51595 - DNA, 15 bp, Homo sapiens
gagagagattttgca

SEQ ID NO: 51596 - DNA, 15 bp, Homo sapiens
agagagattttgcag

SEQ ID NO: 51597 - DNA, 15 bp, Homo sapiens
gagagattttgcagg

SEQ ID NO: 51598 - DNA, 15 bp, Homo sapiens
agagattttgcagga

SEQ ID NO: 51599 - DNA, 15 bp, Homo sapiens
gagattttgcaggat

SEQ ID NO: 51600 - DNA, 15 bp, Homo sapiens
agattttgcaggata

SEQ ID NO: 51601 - DNA, 15 bp, Homo sapiens
gattttgcaggatat

SEQ ID NO: 51602 - DNA, 15 bp, Homo sapiens
attttgcaggatatt

SEQ ID NO: 51603 - DNA, 15 bp, Homo sapiens
ttttgcaggatattg

SEQ ID NO: 51604 - DNA, 15 bp, Homo sapiens
tttgcaggatattga

SEQ ID NO: 51605 - DNA, 15 bp, Homo sapiens
ttgcaggatattgag

SEQ ID NO: 51606 - DNA, 15 bp, Homo sapiens
tgcaggatattgagt

SEQ ID NO: 51607 - DNA, 15 bp, Homo sapiens
gcaggatattgagtc

SEQ ID NO: 51608 - DNA, 15 bp, Homo sapiens
caggatattgagtca

SEQ ID NO: 51609 - DNA, 15 bp, Homo sapiens
aggatattgagtcag

SEQ ID NO: 51610 - DNA, 15 bp, Homo sapiens
ggatattgagtcagt

SEQ ID NO: 51611 - DNA, 15 bp, Homo sapiens
gatattgagtcagta

SEQ ID NO: 51612 - DNA, 15 bp, Homo sapiens
atattgagtcagtag

SEQ ID NO: 51613 - DNA, 15 bp, Homo sapiens
tattgagtcagtagg

SEQ ID NO: 51614 - DNA, 15 bp, Homo sapiens
attgagtcagtaggg

SEQ ID NO: 51615 - DNA, 15 bp, Homo sapiens
ttgagtcagtaggga

SEQ ID NO: 51616 - DNA, 15 bp, Homo sapiens
tgagtcagtagggag

SEQ ID NO: 51617 - DNA, 15 bp, Homo sapiens
gagtcagtagggagg

SEQ ID NO: 51618 - DNA, 15 bp, Homo sapiens
agtcagtagggaggg

SEQ ID NO: 51619 - DNA, 15 bp, Homo sapiens
gtcagtagggagggg

SEQ ID NO: 51620 - DNA, 15 bp, Homo sapiens
tcagtagggaggggt

SEQ ID NO: 51621 - DNA, 15 bp, Homo sapiens
cagtagggaggggtc

SEQ ID NO: 51622 - DNA, 15 bp, Homo sapiens
agtagggaggggtct

SEQ ID NO: 51623 - DNA, 15 bp, Homo sapiens
gtagggaggggtctc

SEQ ID NO: 51624 - DNA, 15 bp, Homo sapiens
tagggaggggtctca

SEQ ID NO: 51625 - DNA, 15 bp, Homo sapiens
agggaggggtctcat

SEQ ID NO: 51626 - DNA, 15 bp, Homo sapiens
gggaggggtctcatt

SEQ ID NO: 51627 - DNA, 15 bp, Homo sapiens
ggaggggtctcattt

SEQ ID NO: 51628 - DNA, 15 bp, Homo sapiens
gaggggtctcattta

SEQ ID NO: 51629 - DNA, 15 bp, Homo sapiens
aggggtctcatttaa

SEQ ID NO: 51630 - DNA, 15 bp, Homo sapiens
ggggtctcatttaat

SEQ ID NO: 51631 - DNA, 15 bp, Homo sapiens
gggtctcatttaata

SEQ ID NO: 51632 - DNA, 15 bp, Homo sapiens
ggtctcatttaatat

SEQ ID NO: 51633 - DNA, 15 bp, Homo sapiens
gtctcatttaatatc

SEQ ID NO: 51634 - DNA, 15 bp, Homo sapiens
tctcatttaatatca

SEQ ID NO: 51635 - DNA, 15 bp, Homo sapiens
ctcatttaatatcat

SEQ ID NO: 51636 - DNA, 15 bp, Homo sapiens
tcatttaatatcatg

SEQ ID NO: 51637 - DNA, 15 bp, Homo sapiens
catttaatatcatgt

SEQ ID NO: 51638 - DNA, 15 bp, Homo sapiens
atttaatatcatgtc

SEQ ID NO: 51639 - DNA, 15 bp, Homo sapiens
tttaatatcatgtcg

SEQ ID NO: 51640 - DNA, 15 bp, Homo sapiens
ttaatatcatgtcgc

SEQ ID NO: 51641 - DNA, 15 bp, Homo sapiens
taatatcatgtcgcc

SEQ ID NO: 51642 - DNA, 15 bp, Homo sapiens
aatatcatgtcgcct

SEQ ID NO: 51643 - DNA, 15 bp, Homo sapiens
atatcatgtcgcctt

SEQ ID NO: 51644 - DNA, 15 bp, Homo sapiens
tatcatgtcgccttt

SEQ ID NO: 51645 - DNA, 15 bp, Homo sapiens
atcatgtcgcctttt

SEQ ID NO: 51646 - DNA, 15 bp, Homo sapiens
tcatgtcgcctttta

SEQ ID NO: 51647 - DNA, 15 bp, Homo sapiens
catgtcgccttttat

SEQ ID NO: 51648 - DNA, 15 bp, Homo sapiens
atgtcgccttttata

SEQ ID NO: 51649 - DNA, 15 bp, Homo sapiens
tgtcgccttttatat

SEQ ID NO: 51650 - DNA, 15 bp, Homo sapiens
gtcgccttttatatg

SEQ ID NO: 51651 - DNA, 15 bp, Homo sapiens
tcgccttttatatgc

SEQ ID NO: 51652 - DNA, 15 bp, Homo sapiens
cgccttttatatgca

SEQ ID NO: 51653 - DNA, 15 bp, Homo sapiens
gccttttatatgcag

SEQ ID NO: 51654 - DNA, 15 bp, Homo sapiens
ccttttatatgcagt

SEQ ID NO: 51655 - DNA, 15 bp, Homo sapiens
cttttatatgcagtt

SEQ ID NO: 51656 - DNA, 15 bp, Homo sapiens
ttttatatgcagtta

SEQ ID NO: 51657 - DNA, 15 bp, Homo sapiens
tttatatgcagttag

SEQ ID NO: 51658 - DNA, 15 bp, Homo sapiens
ttatatgcagttaga

SEQ ID NO: 51659 - DNA, 15 bp, Homo sapiens
tatatgcagttagaa

SEQ ID NO: 51660 - DNA, 15 bp, Homo sapiens
atatgcagttagaaa

SEQ ID NO: 51661 - DNA, 15 bp, Homo sapiens
tatgcagttagaaaa

SEQ ID NO: 51662 - DNA, 15 bp, Homo sapiens
atgcagttagaaaat

SEQ ID NO: 51663 - DNA, 15 bp, Homo sapiens
tgcagttagaaaatc

SEQ ID NO: 51664 - DNA, 15 bp, Homo sapiens
gcagttagaaaatca

SEQ ID NO: 51665 - DNA, 15 bp, Homo sapiens
cagttagaaaatcaa

SEQ ID NO: 51666 - DNA, 15 bp, Homo sapiens
agttagaaaatcaac

SEQ ID NO: 51667 - DNA, 15 bp, Homo sapiens
gttagaaaatcaacg

SEQ ID NO: 51668 - DNA, 15 bp, Homo sapiens
ttagaaaatcaacgt

SEQ ID NO: 51669 - DNA, 15 bp, Homo sapiens
tagaaaatcaacgtt

SEQ ID NO: 51670 - DNA, 15 bp, Homo sapiens
agaaaatcaacgttc

SEQ ID NO: 51671 - DNA, 15 bp, Homo sapiens
gaaaatcaacgttcc

SEQ ID NO: 51672 - DNA, 15 bp, Homo sapiens
aaaatcaacgttccc

SEQ ID NO: 51673 - DNA, 15 bp, Homo sapiens
aaatcaacgttccca

SEQ ID NO: 51674 - DNA, 15 bp, Homo sapiens
aatcaacgttcccaa

SEQ ID NO: 51675 - DNA, 15 bp, Homo sapiens
atcaacgttcccaat

SEQ ID NO: 51676 - DNA, 15 bp, Homo sapiens
tcaacgttcccaatt

SEQ ID NO: 51677 - DNA, 15 bp, Homo sapiens
caacgttcccaatta

SEQ ID NO: 51678 - DNA, 15 bp, Homo sapiens
aacgttcccaattac

SEQ ID NO: 51679 - DNA, 15 bp, Homo sapiens
acgttcccaattaca

SEQ ID NO: 51680 - DNA, 15 bp, Homo sapiens
cgttcccaattacat

SEQ ID NO: 51681 - DNA, 15 bp, Homo sapiens
gttcccaattacata

SEQ ID NO: 51682 - DNA, 15 bp, Homo sapiens
ttcccaattacatat

SEQ ID NO: 51683 - DNA, 15 bp, Homo sapiens
tcccaattacatatt

SEQ ID NO: 51684 - DNA, 15 bp, Homo sapiens
cccaattacatatta

SEQ ID NO: 51685 - DNA, 15 bp, Homo sapiens
ccaattacatattac

SEQ ID NO: 51686 - DNA, 15 bp, Homo sapiens
caattacatattact

SEQ ID NO: 51687 - DNA, 15 bp, Homo sapiens
aattacatattactt

SEQ ID NO: 51688 - DNA, 15 bp, Homo sapiens
attacatattacttt

SEQ ID NO: 51689 - DNA, 15 bp, Homo sapiens
ttacatattactttg

SEQ ID NO: 51690 - DNA, 15 bp, Homo sapiens
tacatattactttgc

SEQ ID NO: 51691 - DNA, 15 bp, Homo sapiens
acatattactttgct

SEQ ID NO: 51692 - DNA, 15 bp, Homo sapiens
catattactttgctt

SEQ ID NO: 51693 - DNA, 15 bp, Homo sapiens
atattactttgcttt

SEQ ID NO: 51694 - DNA, 15 bp, Homo sapiens
tattactttgcttta

SEQ ID NO: 51695 - DNA, 15 bp, Homo sapiens
attactttgctttaa

SEQ ID NO: 51696 - DNA, 15 bp, Homo sapiens
ttactttgctttaaa

SEQ ID NO: 51697 - DNA, 15 bp, Homo sapiens
tactttgctttaaaa

SEQ ID NO: 51698 - DNA, 15 bp, Homo sapiens
actttgctttaaaag

SEQ ID NO: 51699 - DNA, 15 bp, Homo sapiens
ctttgctttaaaaga

SEQ ID NO: 51700 - DNA, 15 bp, Homo sapiens
tttgctttaaaagat

SEQ ID NO: 51701 - DNA, 15 bp, Homo sapiens
ttgctttaaaagatt

SEQ ID NO: 51702 - DNA, 15 bp, Homo sapiens
tgctttaaaagatta

SEQ ID NO: 51703 - DNA, 15 bp, Homo sapiens
gctttaaaagattac

SEQ ID NO: 51704 - DNA, 15 bp, Homo sapiens
ctttaaaagattact

SEQ ID NO: 51705 - DNA, 15 bp, Homo sapiens
tttaaaagattacta

SEQ ID NO: 51706 - DNA, 15 bp, Homo sapiens
ttaaaagattactag

SEQ ID NO: 51707 - DNA, 15 bp, Homo sapiens
taaaagattactagg

SEQ ID NO: 51708 - DNA, 15 bp, Homo sapiens
aaaagattactagga

SEQ ID NO: 51709 - DNA, 15 bp, Homo sapiens
aaagattactaggag

SEQ ID NO: 51710 - DNA, 15 bp, Homo sapiens
aagattactaggagg

SEQ ID NO: 51711 - DNA, 15 bp, Homo sapiens
agattactaggagga

SEQ ID NO: 51712 - DNA, 15 bp, Homo sapiens
gattactaggaggat

SEQ ID NO: 51713 - DNA, 15 bp, Homo sapiens
attactaggaggatt

SEQ ID NO: 51714 - DNA, 15 bp, Homo sapiens
ttactaggaggatta

SEQ ID NO: 51715 - DNA, 15 bp, Homo sapiens
tactaggaggattaa

SEQ ID NO: 51716 - DNA, 15 bp, Homo sapiens
actaggaggattaat

SEQ ID NO: 51717 - DNA, 15 bp, Homo sapiens
ctaggaggattaata

SEQ ID NO: 51718 - DNA, 15 bp, Homo sapiens
taggaggattaataa

SEQ ID NO: 51719 - DNA, 15 bp, Homo sapiens
aggaggattaataaa

SEQ ID NO: 51720 - DNA, 15 bp, Homo sapiens
ggaggattaataaac

SEQ ID NO: 51721 - DNA, 15 bp, Homo sapiens
gaggattaataaaca

SEQ ID NO: 51722 - DNA, 15 bp, Homo sapiens
aggattaataaacac

SEQ ID NO: 51723 - DNA, 15 bp, Homo sapiens
ggattaataaacact

SEQ ID NO: 51724 - DNA, 15 bp, Homo sapiens
gattaataaacactc

SEQ ID NO: 51725 - DNA, 15 bp, Homo sapiens
attaataaacactca

SEQ ID NO: 51726 - DNA, 15 bp, Homo sapiens
ttaataaacactcag

SEQ ID NO: 51727 - DNA, 15 bp, Homo sapiens
taataaacactcaga

SEQ ID NO: 51728 - DNA, 15 bp, Homo sapiens
aataaacactcagaa

SEQ ID NO: 51729 - DNA, 15 bp, Homo sapiens
ataaacactcagaaa

SEQ ID NO: 51730 - DNA, 15 bp, Homo sapiens
taaacactcagaaat

SEQ ID NO: 51731 - DNA, 15 bp, Homo sapiens
aaacactcagaaata

SEQ ID NO: 51732 - DNA, 15 bp, Homo sapiens
aacactcagaaatat

SEQ ID NO: 51733 - DNA, 15 bp, Homo sapiens
acactcagaaatatg

SEQ ID NO: 51734 - DNA, 15 bp, Homo sapiens
cactcagaaatatgc

SEQ ID NO: 51735 - DNA, 15 bp, Homo sapiens
actcagaaatatgcc

SEQ ID NO: 51736 - DNA, 15 bp, Homo sapiens
ctcagaaatatgcct

SEQ ID NO: 51737 - DNA, 15 bp, Homo sapiens
tcagaaatatgcctt

SEQ ID NO: 51738 - DNA, 15 bp, Homo sapiens
cagaaatatgccttt

SEQ ID NO: 51739 - DNA, 15 bp, Homo sapiens
agaaatatgcctttc

SEQ ID NO: 51740 - DNA, 15 bp, Homo sapiens
gaaatatgcctttct

SEQ ID NO: 51741 - DNA, 15 bp, Homo sapiens
aaatatgcctttctt

SEQ ID NO: 51742 - DNA, 15 bp, Homo sapiens
aatatgcctttcttt

SEQ ID NO: 51743 - DNA, 15 bp, Homo sapiens
atatgcctttctttg

SEQ ID NO: 51744 - DNA, 15 bp, Homo sapiens
tatgcctttctttgc

SEQ ID NO: 51745 - DNA, 15 bp, Homo sapiens
atgcctttctttgct

SEQ ID NO: 51746 - DNA, 15 bp, Homo sapiens
tgcctttctttgctt

SEQ ID NO: 51747 - DNA, 15 bp, Homo sapiens
gcctttctttgcttc

SEQ ID NO: 51748 - DNA, 15 bp, Homo sapiens
cctttctttgcttct

SEQ ID NO: 51749 - DNA, 15 bp, Homo sapiens
ctttctttgcttctg

SEQ ID NO: 51750 - DNA, 15 bp, Homo sapiens
tttctttgcttctgg

SEQ ID NO: 51751 - DNA, 15 bp, Homo sapiens
ttctttgcttctggc

SEQ ID NO: 51752 - DNA, 15 bp, Homo sapiens
tctttgcttctggcc

SEQ ID NO: 51753 - DNA, 15 bp, Homo sapiens
ctttgcttctggcca

SEQ ID NO: 51754 - DNA, 15 bp, Homo sapiens
tttgcttctggccaa

SEQ ID NO: 51755 - DNA, 15 bp, Homo sapiens
ttgcttctggccaag

SEQ ID NO: 51756 - DNA, 15 bp, Homo sapiens
tgcttctggccaaga

SEQ ID NO: 51757 - DNA, 15 bp, Homo sapiens
gcttctggccaagaa

SEQ ID NO: 51758 - DNA, 15 bp, Homo sapiens
cttctggccaagaac

SEQ ID NO: 51759 - DNA, 15 bp, Homo sapiens
ttctggccaagaaca

SEQ ID NO: 51760 - DNA, 15 bp, Homo sapiens
tctggccaagaacat

SEQ ID NO: 51761 - DNA, 15 bp, Homo sapiens
ctggccaagaacatt

SEQ ID NO: 51762 - DNA, 15 bp, Homo sapiens
tggccaagaacattc

SEQ ID NO: 51763 - DNA, 15 bp, Homo sapiens
ggccaagaacattcc

SEQ ID NO: 51764 - DNA, 15 bp, Homo sapiens
gccaagaacattcct

SEQ ID NO: 51765 - DNA, 15 bp, Homo sapiens
ccaagaacattcctg

SEQ ID NO: 51766 - DNA, 15 bp, Homo sapiens
caagaacattcctgc

SEQ ID NO: 51767 - DNA, 15 bp, Homo sapiens
aagaacattcctgcg

SEQ ID NO: 51768 - DNA, 15 bp, Homo sapiens
agaacattcctgcgt

SEQ ID NO: 51769 - DNA, 15 bp, Homo sapiens
gaacattcctgcgtg

SEQ ID NO: 51770 - DNA, 15 bp, Homo sapiens
aacattcctgcgtgc

SEQ ID NO: 51771 - DNA, 15 bp, Homo sapiens
acattcctgcgtgct

SEQ ID NO: 51772 - DNA, 15 bp, Homo sapiens
cattcctgcgtgctt

SEQ ID NO: 51773 - DNA, 15 bp, Homo sapiens
attcctgcgtgcttg

SEQ ID NO: 51774 - DNA, 15 bp, Homo sapiens
ttcctgcgtgcttgt

SEQ ID NO: 51775 - DNA, 15 bp, Homo sapiens
tcctgcgtgcttgtc

SEQ ID NO: 51776 - DNA, 15 bp, Homo sapiens
cctgcgtgcttgtcg

SEQ ID NO: 51777 - DNA, 15 bp, Homo sapiens
ctgcgtgcttgtcgg

SEQ ID NO: 51778 - DNA, 15 bp, Homo sapiens
tgcgtgcttgtcgga

SEQ ID NO: 51779 - DNA, 15 bp, Homo sapiens
gcgtgcttgtcggaa

SEQ ID NO: 51780 - DNA, 15 bp, Homo sapiens
cgtgcttgtcggaaa

SEQ ID NO: 51781 - DNA, 15 bp, Homo sapiens
gtgcttgtcggaaaa

SEQ ID NO: 51782 - DNA, 15 bp, Homo sapiens
tgcttgtcggaaaat

SEQ ID NO: 51783 - DNA, 15 bp, Homo sapiens
gcttgtcggaaaatg

SEQ ID NO: 51784 - DNA, 15 bp, Homo sapiens
cttgtcggaaaatgt

SEQ ID NO: 51785 - DNA, 15 bp, Homo sapiens
ttgtcggaaaatgtt

SEQ ID NO: 51786 - DNA, 15 bp, Homo sapiens
tgtcggaaaatgttc

SEQ ID NO: 51787 - DNA, 15 bp, Homo sapiens
gtcggaaaatgttct

SEQ ID NO: 51788 - DNA, 15 bp, Homo sapiens
tcggaaaatgttctt

SEQ ID NO: 51789 - DNA, 15 bp, Homo sapiens
cggaaaatgttcttt

SEQ ID NO: 51790 - DNA, 15 bp, Homo sapiens
ggaaaatgttctttg

SEQ ID NO: 51791 - DNA, 15 bp, Homo sapiens
gaaaatgttctttgg

SEQ ID NO: 51792 - DNA, 15 bp, Homo sapiens
aaaatgttctttggt

SEQ ID NO: 51793 - DNA, 15 bp, Homo sapiens
aaatgttctttggtt

SEQ ID NO: 51794 - DNA, 15 bp, Homo sapiens
aatgttctttggttg

SEQ ID NO: 51795 - DNA, 15 bp, Homo sapiens
atgttctttggttgc

SEQ ID NO: 51796 - DNA, 15 bp, Homo sapiens
tgttctttggttgct

SEQ ID NO: 51797 - DNA, 15 bp, Homo sapiens
gttctttggttgcta

SEQ ID NO: 51798 - DNA, 15 bp, Homo sapiens
ttctttggttgctac

SEQ ID NO: 51799 - DNA, 15 bp, Homo sapiens
tctttggttgctact

SEQ ID NO: 51800 - DNA, 15 bp, Homo sapiens
ctttggttgctactg

SEQ ID NO: 51801 - DNA, 15 bp, Homo sapiens
tttggttgctactga

SEQ ID NO: 51802 - DNA, 15 bp, Homo sapiens
ttggttgctactgac

SEQ ID NO: 51803 - DNA, 15 bp, Homo sapiens
tggttgctactgaca

SEQ ID NO: 51804 - DNA, 15 bp, Homo sapiens
ggttgctactgacat

SEQ ID NO: 51805 - DNA, 15 bp, Homo sapiens
gttgctactgacatt

SEQ ID NO: 51806 - DNA, 15 bp, Homo sapiens
ttgctactgacatta

SEQ ID NO: 51807 - DNA, 15 bp, Homo sapiens
tgctactgacattaa

SEQ ID NO: 51808 - DNA, 15 bp, Homo sapiens
gctactgacattaag

SEQ ID NO: 51809 - DNA, 15 bp, Homo sapiens
ctactgacattaagg

SEQ ID NO: 51810 - DNA, 15 bp, Homo sapiens
tactgacattaagga

SEQ ID NO: 51811 - DNA, 15 bp, Homo sapiens
actgacattaaggag

SEQ ID NO: 51812 - DNA, 15 bp, Homo sapiens
ctgacattaaggagt

SEQ ID NO: 51813 - DNA, 15 bp, Homo sapiens
tgacattaaggagta

SEQ ID NO: 51814 - DNA, 15 bp, Homo sapiens
gacattaaggagtaa

SEQ ID NO: 51815 - DNA, 15 bp, Homo sapiens
acattaaggagtaag

SEQ ID NO: 51816 - DNA, 15 bp, Homo sapiens
cattaaggagtaagt

SEQ ID NO: 51817 - DNA, 15 bp, Homo sapiens
attaaggagtaagtg

SEQ ID NO: 51818 - DNA, 15 bp, Homo sapiens
ttaaggagtaagtgc

SEQ ID NO: 51819 - DNA, 15 bp, Homo sapiens
taaggagtaagtgca

SEQ ID NO: 51820 - DNA, 15 bp, Homo sapiens
aaggagtaagtgcag

SEQ ID NO: 51821 - DNA, 15 bp, Homo sapiens
aggagtaagtgcagg

SEQ ID NO: 51822 - DNA, 15 bp, Homo sapiens
ggagtaagtgcagga

SEQ ID NO: 51823 - DNA, 15 bp, Homo sapiens
gagtaagtgcaggat

SEQ ID NO: 51824 - DNA, 15 bp, Homo sapiens
agtaagtgcaggata

SEQ ID NO: 51825 - DNA, 15 bp, Homo sapiens
gtaagtgcaggataa

SEQ ID NO: 51826 - DNA, 15 bp, Homo sapiens
taagtgcaggataac

SEQ ID NO: 51827 - DNA, 15 bp, Homo sapiens
aagtgcaggataact

SEQ ID NO: 51828 - DNA, 15 bp, Homo sapiens
agtgcaggataacta

SEQ ID NO: 51829 - DNA, 15 bp, Homo sapiens
gtgcaggataactag

SEQ ID NO: 51830 - DNA, 15 bp, Homo sapiens
tgcaggataactaga

SEQ ID NO: 51831 - DNA, 15 bp, Homo sapiens
gcaggataactagag

SEQ ID NO: 51832 - DNA, 15 bp, Homo sapiens
caggataactagagg

SEQ ID NO: 51833 - DNA, 15 bp, Homo sapiens
aggataactagagga

SEQ ID NO: 51834 - DNA, 15 bp, Homo sapiens
ggataactagaggac

SEQ ID NO: 51835 - DNA, 15 bp, Homo sapiens
gataactagaggacc

SEQ ID NO: 51836 - DNA, 15 bp, Homo sapiens
ataactagaggaccc

SEQ ID NO: 51837 - DNA, 15 bp, Homo sapiens
taactagaggaccct

SEQ ID NO: 51838 - DNA, 15 bp, Homo sapiens
aactagaggacccta

SEQ ID NO: 51839 - DNA, 15 bp, Homo sapiens
actagaggaccctaa

SEQ ID NO: 51840 - DNA, 15 bp, Homo sapiens
ctagaggaccctaaa

SEQ ID NO: 51841 - DNA, 15 bp, Homo sapiens
tagaggaccctaaaa

SEQ ID NO: 51842 - DNA, 15 bp, Homo sapiens
agaggaccctaaaat

SEQ ID NO: 51843 - DNA, 15 bp, Homo sapiens
gaggaccctaaaata

SEQ ID NO: 51844 - DNA, 15 bp, Homo sapiens
aggaccctaaaataa

SEQ ID NO: 51845 - DNA, 15 bp, Homo sapiens
ggaccctaaaataag

SEQ ID NO: 51846 - DNA, 15 bp, Homo sapiens
gaccctaaaataaga

SEQ ID NO: 51847 - DNA, 15 bp, Homo sapiens
accctaaaataagat

SEQ ID NO: 51848 - DNA, 15 bp, Homo sapiens
ccctaaaataagatc

SEQ ID NO: 51849 - DNA, 15 bp, Homo sapiens
cctaaaataagatcc

SEQ ID NO: 51850 - DNA, 15 bp, Homo sapiens
ctaaaataagatcca

SEQ ID NO: 51851 - DNA, 15 bp, Homo sapiens
taaaataagatccaa

SEQ ID NO: 51852 - DNA, 15 bp, Homo sapiens
aaaataagatccaag

SEQ ID NO: 51853 - DNA, 15 bp, Homo sapiens
aaataagatccaaga

SEQ ID NO: 51854 - DNA, 15 bp, Homo sapiens
aataagatccaagaa

SEQ ID NO: 51855 - DNA, 15 bp, Homo sapiens
ataagatccaagaag

SEQ ID NO: 51856 - DNA, 15 bp, Homo sapiens
taagatccaagaagc

SEQ ID NO: 51857 - DNA, 15 bp, Homo sapiens
aagatccaagaagcc

SEQ ID NO: 51858 - DNA, 15 bp, Homo sapiens
agatccaagaagccc

SEQ ID NO: 51859 - DNA, 15 bp, Homo sapiens
gatccaagaagccct

SEQ ID NO: 51860 - DNA, 15 bp, Homo sapiens
atccaagaagcccta

SEQ ID NO: 51861 - DNA, 15 bp, Homo sapiens
tccaagaagccctaa

SEQ ID NO: 51862 - DNA, 15 bp, Homo sapiens
ccaagaagccctaac

SEQ ID NO: 51863 - DNA, 15 bp, Homo sapiens
caagaagccctaaca

SEQ ID NO: 51864 - DNA, 15 bp, Homo sapiens
aagaagccctaacac

SEQ ID NO: 51865 - DNA, 15 bp, Homo sapiens
agaagccctaacaca

SEQ ID NO: 51866 - DNA, 15 bp, Homo sapiens
gaagccctaacacac

SEQ ID NO: 51867 - DNA, 15 bp, Homo sapiens
aagccctaacacacc

SEQ ID NO: 51868 - DNA, 15 bp, Homo sapiens
agccctaacacaccg

SEQ ID NO: 51869 - DNA, 15 bp, Homo sapiens
gccctaacacaccgc

SEQ ID NO: 51870 - DNA, 15 bp, Homo sapiens
ccctaacacaccgcc

SEQ ID NO: 51871 - DNA, 15 bp, Homo sapiens
cctaacacaccgcca

SEQ ID NO: 51872 - DNA, 15 bp, Homo sapiens
ctaacacaccgccaa

SEQ ID NO: 51873 - DNA, 15 bp, Homo sapiens
taacacaccgccaat

SEQ ID NO: 51874 - DNA, 15 bp, Homo sapiens
aacacaccgccaatc

SEQ ID NO: 51875 - DNA, 15 bp, Homo sapiens
acacaccgccaatcg

SEQ ID NO: 51876 - DNA, 15 bp, Homo sapiens
cacaccgccaatcga

SEQ ID NO: 51877 - DNA, 15 bp, Homo sapiens
acaccgccaatcgag

SEQ ID NO: 51878 - DNA, 15 bp, Homo sapiens
caccgccaatcgagg

SEQ ID NO: 51879 - DNA, 15 bp, Homo sapiens
accgccaatcgaggc

SEQ ID NO: 51880 - DNA, 15 bp, Homo sapiens
ccgccaatcgaggct

SEQ ID NO: 51881 - DNA, 15 bp, Homo sapiens
cgccaatcgaggctt

SEQ ID NO: 51882 - DNA, 15 bp, Homo sapiens
gccaatcgaggctta

SEQ ID NO: 51883 - DNA, 15 bp, Homo sapiens
ccaatcgaggcttat

SEQ ID NO: 51884 - DNA, 15 bp, Homo sapiens
caatcgaggcttatc

SEQ ID NO: 51885 - DNA, 15 bp, Homo sapiens
aatcgaggcttatca

SEQ ID NO: 51886 - DNA, 15 bp, Homo sapiens
atcgaggcttatcaa

SEQ ID NO: 51887 - DNA, 15 bp, Homo sapiens
tcgaggcttatcaaa

SEQ ID NO: 51888 - DNA, 15 bp, Homo sapiens
cgaggcttatcaaag

SEQ ID NO: 51889 - DNA, 15 bp, Homo sapiens
gaggcttatcaaagc

SEQ ID NO: 51890 - DNA, 15 bp, Homo sapiens
aggcttatcaaagct

SEQ ID NO: 51891 - DNA, 15 bp, Homo sapiens
ggcttatcaaagctc

SEQ ID NO: 51892 - DNA, 15 bp, Homo sapiens
gcttatcaaagctcc

SEQ ID NO: 51893 - DNA, 15 bp, Homo sapiens
cttatcaaagctccc

SEQ ID NO: 51894 - DNA, 15 bp, Homo sapiens
ttatcaaagctcccc

SEQ ID NO: 51895 - DNA, 15 bp, Homo sapiens
tatcaaagctccccc

SEQ ID NO: 51896 - DNA, 15 bp, Homo sapiens
atcaaagctccccca

SEQ ID NO: 51897 - DNA, 15 bp, Homo sapiens
tcaaagctcccccag

SEQ ID NO: 51898 - DNA, 15 bp, Homo sapiens
caaagctcccccagc

SEQ ID NO: 51899 - DNA, 15 bp, Homo sapiens
aaagctcccccagcg

SEQ ID NO: 51900 - DNA, 15 bp, Homo sapiens
aagctcccccagcgc

SEQ ID NO: 51901 - DNA, 15 bp, Homo sapiens
agctcccccagcgcg

SEQ ID NO: 51902 - DNA, 15 bp, Homo sapiens
gctcccccagcgcga

SEQ ID NO: 51903 - DNA, 15 bp, Homo sapiens
ctcccccagcgcgag

SEQ ID NO: 51904 - DNA, 15 bp, Homo sapiens
tcccccagcgcgagg

SEQ ID NO: 51905 - DNA, 15 bp, Homo sapiens
cccccagcgcgagga

SEQ ID NO: 51906 - DNA, 15 bp, Homo sapiens
ccccagcgcgaggaa

SEQ ID NO: 51907 - DNA, 15 bp, Homo sapiens
cccagcgcgaggaaa

SEQ ID NO: 51908 - DNA, 15 bp, Homo sapiens
ccagcgcgaggaaaa

SEQ ID NO: 51909 - DNA, 15 bp, Homo sapiens
cagcgcgaggaaaac

SEQ ID NO: 51910 - DNA, 15 bp, Homo sapiens
agcgcgaggaaaact

SEQ ID NO: 51911 - DNA, 15 bp, Homo sapiens
gcgcgaggaaaactt

SEQ ID NO: 51912 - DNA, 15 bp, Homo sapiens
cgcgaggaaaacttg

SEQ ID NO: 51913 - DNA, 15 bp, Homo sapiens
gcgaggaaaacttgc

SEQ ID NO: 51914 - DNA, 15 bp, Homo sapiens
cgaggaaaacttgca

SEQ ID NO: 51915 - DNA, 15 bp, Homo sapiens
gaggaaaacttgcat

SEQ ID NO: 51916 - DNA, 15 bp, Homo sapiens
aggaaaacttgcata

SEQ ID NO: 51917 - DNA, 15 bp, Homo sapiens
ggaaaacttgcatag

SEQ ID NO: 51918 - DNA, 15 bp, Homo sapiens
gaaaacttgcataga

SEQ ID NO: 51919 - DNA, 15 bp, Homo sapiens
aaaacttgcatagaa

SEQ ID NO: 51920 - DNA, 15 bp, Homo sapiens
aaacttgcatagaag

SEQ ID NO: 51921 - DNA, 15 bp, Homo sapiens
aacttgcatagaagc

SEQ ID NO: 51922 - DNA, 15 bp, Homo sapiens
acttgcatagaagcc

SEQ ID NO: 51923 - DNA, 15 bp, Homo sapiens
cttgcatagaagcca

SEQ ID NO: 51924 - DNA, 15 bp, Homo sapiens
ttgcatagaagccaa

SEQ ID NO: 51925 - DNA, 15 bp, Homo sapiens
tgcatagaagccaaa

SEQ ID NO: 51926 - DNA, 15 bp, Homo sapiens
gcatagaagccaaac

SEQ ID NO: 51927 - DNA, 15 bp, Homo sapiens
catagaagccaaaca

SEQ ID NO: 51928 - DNA, 15 bp, Homo sapiens
atagaagccaaacaa

SEQ ID NO: 51929 - DNA, 15 bp, Homo sapiens
tagaagccaaacaag

SEQ ID NO: 51930 - DNA, 15 bp, Homo sapiens
agaagccaaacaaga

SEQ ID NO: 51931 - DNA, 15 bp, Homo sapiens
gaagccaaacaagaa

SEQ ID NO: 51932 - DNA, 15 bp, Homo sapiens
aagccaaacaagaac

SEQ ID NO: 51933 - DNA, 15 bp, Homo sapiens
agccaaacaagaacg

SEQ ID NO: 51934 - DNA, 15 bp, Homo sapiens
gccaaacaagaacga

SEQ ID NO: 51935 - DNA, 15 bp, Homo sapiens
ccaaacaagaacgag

SEQ ID NO: 51936 - DNA, 15 bp, Homo sapiens
caaacaagaacgagg

SEQ ID NO: 51937 - DNA, 15 bp, Homo sapiens
aaacaagaacgagga

SEQ ID NO: 51938 - DNA, 15 bp, Homo sapiens
aacaagaacgaggag

SEQ ID NO: 51939 - DNA, 15 bp, Homo sapiens
acaagaacgaggagt

SEQ ID NO: 51940 - DNA, 15 bp, Homo sapiens
caagaacgaggagtc

SEQ ID NO: 51941 - DNA, 15 bp, Homo sapiens
aagaacgaggagtca

SEQ ID NO: 51942 - DNA, 15 bp, Homo sapiens
agaacgaggagtcaa

SEQ ID NO: 51943 - DNA, 15 bp, Homo sapiens
gaacgaggagtcaaa

SEQ ID NO: 51944 - DNA, 15 bp, Homo sapiens
aacgaggagtcaaaa

SEQ ID NO: 51945 - DNA, 15 bp, Homo sapiens
acgaggagtcaaaat

SEQ ID NO: 51946 - DNA, 15 bp, Homo sapiens
cgaggagtcaaaatc

SEQ ID NO: 51947 - DNA, 15 bp, Homo sapiens
gaggagtcaaaatcc

SEQ ID NO: 51948 - DNA, 15 bp, Homo sapiens
aggagtcaaaatcca

SEQ ID NO: 51949 - DNA, 15 bp, Homo sapiens
ggagtcaaaatccac

SEQ ID NO: 51950 - DNA, 15 bp, Homo sapiens
gagtcaaaatccacc

SEQ ID NO: 51951 - DNA, 15 bp, Homo sapiens
agtcaaaatccaccg

SEQ ID NO: 51952 - DNA, 15 bp, Homo sapiens
gtcaaaatccaccga

SEQ ID NO: 51953 - DNA, 15 bp, Homo sapiens
tcaaaatccaccgac

SEQ ID NO: 51954 - DNA, 15 bp, Homo sapiens
caaaatccaccgacg

SEQ ID NO: 51955 - DNA, 15 bp, Homo sapiens
aaaatccaccgacga

SEQ ID NO: 51956 - DNA, 15 bp, Homo sapiens
aaatccaccgacgac

SEQ ID NO: 51957 - DNA, 15 bp, Homo sapiens
aatccaccgacgacg

SEQ ID NO: 51958 - DNA, 15 bp, Homo sapiens
atccaccgacgacga

SEQ ID NO: 51959 - DNA, 15 bp, Homo sapiens
tccaccgacgacgag

SEQ ID NO: 51960 - DNA, 15 bp, Homo sapiens
ccaccgacgacgagt

SEQ ID NO: 51961 - DNA, 15 bp, Homo sapiens
caccgacgacgagtc

SEQ ID NO: 51962 - DNA, 15 bp, Homo sapiens
accgacgacgagtcg

SEQ ID NO: 51963 - DNA, 15 bp, Homo sapiens
ccgacgacgagtcgc

SEQ ID NO: 51964 - DNA, 15 bp, Homo sapiens
cgacgacgagtcgca

SEQ ID NO: 51965 - DNA, 15 bp, Homo sapiens
gacgacgagtcgcac

SEQ ID NO: 51966 - DNA, 15 bp, Homo sapiens
acgacgagtcgcacg

SEQ ID NO: 51967 - DNA, 15 bp, Homo sapiens
cgacgagtcgcacgc

SEQ ID NO: 51968 - DNA, 15 bp, Homo sapiens
gacgagtcgcacgcc

SEQ ID NO: 51969 - DNA, 15 bp, Homo sapiens
acgagtcgcacgccc

SEQ ID NO: 51970 - DNA, 15 bp, Homo sapiens
cgagtcgcacgcccc

SEQ ID NO: 51971 - DNA, 15 bp, Homo sapiens
gagtcgcacgcccca

SEQ ID NO: 51972 - DNA, 15 bp, Homo sapiens
agtcgcacgccccac

SEQ ID NO: 51973 - DNA, 15 bp, Homo sapiens
gtcgcacgccccacc

SEQ ID NO: 51974 - DNA, 15 bp, Homo sapiens
tcgcacgccccaccg

SEQ ID NO: 51975 - DNA, 15 bp, Homo sapiens
cgcacgccccaccga

SEQ ID NO: 51976 - DNA, 15 bp, Homo sapiens
gcacgccccaccgag

SEQ ID NO: 51977 - DNA, 15 bp, Homo sapiens
cacgccccaccgagc

SEQ ID NO: 51978 - DNA, 15 bp, Homo sapiens
acgccccaccgagct

SEQ ID NO: 51979 - DNA, 15 bp, Homo sapiens
cgccccaccgagctg

SEQ ID NO: 51980 - DNA, 15 bp, Homo sapiens
gccccaccgagctgg

SEQ ID NO: 51981 - DNA, 15 bp, Homo sapiens
ccccaccgagctgga

SEQ ID NO: 51982 - DNA, 15 bp, Homo sapiens
cccaccgagctggag

SEQ ID NO: 51983 - DNA, 15 bp, Homo sapiens
ccaccgagctggagt

SEQ ID NO: 51984 - DNA, 15 bp, Homo sapiens
caccgagctggagtc

SEQ ID NO: 51985 - DNA, 15 bp, Homo sapiens
accgagctggagtca

SEQ ID NO: 51986 - DNA, 15 bp, Homo sapiens
ccgagctggagtcag

SEQ ID NO: 51987 - DNA, 15 bp, Homo sapiens
cgagctggagtcagc

SEQ ID NO: 51988 - DNA, 15 bp, Homo sapiens
gagctggagtcagca

SEQ ID NO: 51989 - DNA, 15 bp, Homo sapiens
agctggagtcagcag

SEQ ID NO: 51990 - DNA, 15 bp, Homo sapiens
gctggagtcagcagc

SEQ ID NO: 51991 - DNA, 15 bp, Homo sapiens
ctggagtcagcagca

SEQ ID NO: 51992 - DNA, 15 bp, Homo sapiens
tggagtcagcagcac

SEQ ID NO: 51993 - DNA, 15 bp, Homo sapiens
ggagtcagcagcacc

SEQ ID NO: 51994 - DNA, 15 bp, Homo sapiens
gagtcagcagcacca

SEQ ID NO: 51995 - DNA, 15 bp, Homo sapiens
agtcagcagcaccat

SEQ ID NO: 51996 - DNA, 15 bp, Homo sapiens
gtcagcagcaccatt

SEQ ID NO: 51997 - DNA, 15 bp, Homo sapiens
tcagcagcaccattc

SEQ ID NO: 51998 - DNA, 15 bp, Homo sapiens
cagcagcaccattca

SEQ ID NO: 51999 - DNA, 15 bp, Homo sapiens
agcagcaccattcaa

SEQ ID NO: 52000 - DNA, 15 bp, Homo sapiens
gcagcaccattcaac

SEQ ID NO: 52001 - DNA, 15 bp, Homo sapiens
cagcaccattcaaca

SEQ ID NO: 52002 - DNA, 15 bp, Homo sapiens
agcaccattcaacaa

SEQ ID NO: 52003 - DNA, 15 bp, Homo sapiens
gcaccattcaacaag

SEQ ID NO: 52004 - DNA, 15 bp, Homo sapiens
caccattcaacaagt

SEQ ID NO: 52005 - DNA, 15 bp, Homo sapiens
accattcaacaagtc

SEQ ID NO: 52006 - DNA, 15 bp, Homo sapiens
ccattcaacaagtcc

SEQ ID NO: 52007 - DNA, 15 bp, Homo sapiens
cattcaacaagtccc

SEQ ID NO: 52008 - DNA, 15 bp, Homo sapiens
attcaacaagtccct

SEQ ID NO: 52009 - DNA, 15 bp, Homo sapiens
ttcaacaagtccctc

SEQ ID NO: 52010 - DNA, 15 bp, Homo sapiens
tcaacaagtccctcc

SEQ ID NO: 52011 - DNA, 15 bp, Homo sapiens
caacaagtccctcct

SEQ ID NO: 52012 - DNA, 15 bp, Homo sapiens
aacaagtccctccta

SEQ ID NO: 52013 - DNA, 15 bp, Homo sapiens
acaagtccctcctac

SEQ ID NO: 52014 - DNA, 15 bp, Homo sapiens
caagtccctcctacc

SEQ ID NO: 52015 - DNA, 15 bp, Homo sapiens
aagtccctcctacca

SEQ ID NO: 52016 - DNA, 15 bp, Homo sapiens
agtccctcctaccag

SEQ ID NO: 52017 - DNA, 15 bp, Homo sapiens
gtccctcctaccagc

SEQ ID NO: 52018 - DNA, 15 bp, Homo sapiens
tccctcctaccagct

SEQ ID NO: 52019 - DNA, 15 bp, Homo sapiens
ccctcctaccagctc

SEQ ID NO: 52020 - DNA, 15 bp, Homo sapiens
cctcctaccagctct

SEQ ID NO: 52021 - DNA, 15 bp, Homo sapiens
ctcctaccagctctc

SEQ ID NO: 52022 - DNA, 15 bp, Homo sapiens
tcctaccagctctct

SEQ ID NO: 52023 - DNA, 15 bp, Homo sapiens
cctaccagctctcta

SEQ ID NO: 52024 - DNA, 15 bp, Homo sapiens
ctaccagctctctaa

SEQ ID NO: 52025 - DNA, 15 bp, Homo sapiens
taccagctctctaag

SEQ ID NO: 52026 - DNA, 15 bp, Homo sapiens
accagctctctaagg

SEQ ID NO: 52027 - DNA, 15 bp, Homo sapiens
ccagctctctaaggg

SEQ ID NO: 52028 - DNA, 15 bp, Homo sapiens
cagctctctaaggga

SEQ ID NO: 52029 - DNA, 15 bp, Homo sapiens
agctctctaagggat

SEQ ID NO: 52030 - DNA, 15 bp, Homo sapiens
gctctctaagggatc

SEQ ID NO: 52031 - DNA, 15 bp, Homo sapiens
ctctctaagggatcc

SEQ ID NO: 52032 - DNA, 15 bp, Homo sapiens
tctctaagggatccc

SEQ ID NO: 52033 - DNA, 15 bp, Homo sapiens
ctctaagggatcccg

SEQ ID NO: 52034 - DNA, 15 bp, Homo sapiens
tctaagggatcccgc

SEQ ID NO: 52035 - DNA, 15 bp, Homo sapiens
ctaagggatcccgca

SEQ ID NO: 52036 - DNA, 15 bp, Homo sapiens
taagggatcccgcaa

SEQ ID NO: 52037 - DNA, 15 bp, Homo sapiens
aagggatcccgcaaa

SEQ ID NO: 52038 - DNA, 15 bp, Homo sapiens
agggatcccgcaaaa

SEQ ID NO: 52039 - DNA, 15 bp, Homo sapiens
gggatcccgcaaaac

SEQ ID NO: 52040 - DNA, 15 bp, Homo sapiens
ggatcccgcaaaacc

SEQ ID NO: 52041 - DNA, 15 bp, Homo sapiens
gatcccgcaaaacct

SEQ ID NO: 52042 - DNA, 15 bp, Homo sapiens
atcccgcaaaacctt

SEQ ID NO: 52043 - DNA, 15 bp, Homo sapiens
tcccgcaaaaccttc

SEQ ID NO: 52044 - DNA, 15 bp, Homo sapiens
cccgcaaaaccttcc

SEQ ID NO: 52045 - DNA, 15 bp, Homo sapiens
ccgcaaaaccttcct

SEQ ID NO: 52046 - DNA, 15 bp, Homo sapiens
cgcaaaaccttcctt

SEQ ID NO: 52047 - DNA, 15 bp, Homo sapiens
gcaaaaccttccttt

SEQ ID NO: 52048 - DNA, 15 bp, Homo sapiens
caaaaccttccttta

SEQ ID NO: 52049 - DNA, 15 bp, Homo sapiens
aaaaccttcctttac

SEQ ID NO: 52050 - DNA, 15 bp, Homo sapiens
aaaccttcctttacc

SEQ ID NO: 52051 - DNA, 15 bp, Homo sapiens
aaccttcctttacca

SEQ ID NO: 52052 - DNA, 15 bp, Homo sapiens
accttcctttaccac

SEQ ID NO: 52053 - DNA, 15 bp, Homo sapiens
ccttcctttaccact

SEQ ID NO: 52054 - DNA, 15 bp, Homo sapiens
cttcctttaccactt

SEQ ID NO: 52055 - DNA, 15 bp, Homo sapiens
ttcctttaccacttc

SEQ ID NO: 52056 - DNA, 15 bp, Homo sapiens
tcctttaccacttcc

SEQ ID NO: 52057 - DNA, 15 bp, Homo sapiens
cctttaccacttccc

SEQ ID NO: 52058 - DNA, 15 bp, Homo sapiens
ctttaccacttcccc

SEQ ID NO: 52059 - DNA, 15 bp, Homo sapiens
tttaccacttcccca

SEQ ID NO: 52060 - DNA, 15 bp, Homo sapiens
ttaccacttccccac

SEQ ID NO: 52061 - DNA, 15 bp, Homo sapiens
taccacttccccacc

SEQ ID NO: 52062 - DNA, 15 bp, Homo sapiens
accacttccccaccc

SEQ ID NO: 52063 - DNA, 15 bp, Homo sapiens
ccacttccccacccc

SEQ ID NO: 52064 - DNA, 15 bp, Homo sapiens
cacttccccaccccc

SEQ ID NO: 52065 - DNA, 15 bp, Homo sapiens
acttccccaccccca

SEQ ID NO: 52066 - DNA, 15 bp, Homo sapiens
cttccccacccccag

SEQ ID NO: 52067 - DNA, 15 bp, Homo sapiens
ttccccacccccagc

SEQ ID NO: 52068 - DNA, 15 bp, Homo sapiens
tccccacccccagcc

SEQ ID NO: 52069 - DNA, 15 bp, Homo sapiens
ccccacccccagcct

SEQ ID NO: 52070 - DNA, 15 bp, Homo sapiens
cccacccccagcctc

SEQ ID NO: 52071 - DNA, 15 bp, Homo sapiens
ccacccccagcctcc

SEQ ID NO: 52072 - DNA, 15 bp, Homo sapiens
cacccccagcctccc

SEQ ID NO: 52073 - DNA, 15 bp, Homo sapiens
acccccagcctcccg

SEQ ID NO: 52074 - DNA, 15 bp, Homo sapiens
cccccagcctcccgc

SEQ ID NO: 52075 - DNA, 15 bp, Homo sapiens
ccccagcctcccgcc

SEQ ID NO: 52076 - DNA, 15 bp, Homo sapiens
cccagcctcccgccc

SEQ ID NO: 52077 - DNA, 15 bp, Homo sapiens
ccagcctcccgcccc

SEQ ID NO: 52078 - DNA, 15 bp, Homo sapiens
cagcctcccgccccc

SEQ ID NO: 52079 - DNA, 15 bp, Homo sapiens
agcctcccgccccca

SEQ ID NO: 52080 - DNA, 15 bp, Homo sapiens
gcctcccgcccccag

SEQ ID NO: 52081 - DNA, 15 bp, Homo sapiens
cctcccgcccccagt

SEQ ID NO: 52082 - DNA, 15 bp, Homo sapiens
ctcccgcccccagta

SEQ ID NO: 52083 - DNA, 15 bp, Homo sapiens
tcccgcccccagtag

SEQ ID NO: 52084 - DNA, 15 bp, Homo sapiens
cccgcccccagtagc

SEQ ID NO: 52085 - DNA, 15 bp, Homo sapiens
ccgcccccagtagct

SEQ ID NO: 52086 - DNA, 15 bp, Homo sapiens
cgcccccagtagctg

SEQ ID NO: 52087 - DNA, 15 bp, Homo sapiens
gcccccagtagctgc

SEQ ID NO: 52088 - DNA, 15 bp, Homo sapiens
cccccagtagctgct

SEQ ID NO: 52089 - DNA, 15 bp, Homo sapiens
ccccagtagctgctc

SEQ ID NO: 52090 - DNA, 15 bp, Homo sapiens
cccagtagctgctct

SEQ ID NO: 52091 - DNA, 15 bp, Homo sapiens
ccagtagctgctctt

SEQ ID NO: 52092 - DNA, 15 bp, Homo sapiens
cagtagctgctcttg

SEQ ID NO: 52093 - DNA, 15 bp, Homo sapiens
agtagctgctcttgg

SEQ ID NO: 52094 - DNA, 15 bp, Homo sapiens
gtagctgctcttggc

SEQ ID NO: 52095 - DNA, 15 bp, Homo sapiens
tagctgctcttggca

SEQ ID NO: 52096 - DNA, 15 bp, Homo sapiens
agctgctcttggcag

SEQ ID NO: 52097 - DNA, 15 bp, Homo sapiens
gctgctcttggcagc

SEQ ID NO: 52098 - DNA, 15 bp, Homo sapiens
ctgctcttggcagca

SEQ ID NO: 52099 - DNA, 15 bp, Homo sapiens
tgctcttggcagcat

SEQ ID NO: 52100 - DNA, 15 bp, Homo sapiens
gctcttggcagcatg

SEQ ID NO: 52101 - DNA, 15 bp, Homo sapiens
ctcttggcagcatgg

SEQ ID NO: 52102 - DNA, 15 bp, Homo sapiens
tcttggcagcatggc

SEQ ID NO: 52103 - DNA, 15 bp, Homo sapiens
cttggcagcatggcc

SEQ ID NO: 52104 - DNA, 15 bp, Homo sapiens
ttggcagcatggccg

SEQ ID NO: 52105 - DNA, 15 bp, Homo sapiens
tggcagcatggccgg

SEQ ID NO: 52106 - DNA, 15 bp, Homo sapiens
ggcagcatggccggc

SEQ ID NO: 52107 - DNA, 15 bp, Homo sapiens
gcagcatggccggca

SEQ ID NO: 52108 - DNA, 15 bp, Homo sapiens
cagcatggccggcag

SEQ ID NO: 52109 - DNA, 15 bp, Homo sapiens
agcatggccggcaga

SEQ ID NO: 52110 - DNA, 15 bp, Homo sapiens
gcatggccggcagag

SEQ ID NO: 52111 - DNA, 15 bp, Homo sapiens
catggccggcagagg

SEQ ID NO: 52112 - DNA, 15 bp, Homo sapiens
atggccggcagaggg

SEQ ID NO: 52113 - DNA, 15 bp, Homo sapiens
tggccggcagagggc

SEQ ID NO: 52114 - DNA, 15 bp, Homo sapiens
ggccggcagagggca

SEQ ID NO: 52115 - DNA, 15 bp, Homo sapiens
gccggcagagggcac

SEQ ID NO: 52116 - DNA, 15 bp, Homo sapiens
ccggcagagggcacc

SEQ ID NO: 52117 - DNA, 15 bp, Homo sapiens
cggcagagggcaccc

SEQ ID NO: 52118 - DNA, 15 bp, Homo sapiens
ggcagagggcaccct

SEQ ID NO: 52119 - DNA, 15 bp, Homo sapiens
gcagagggcaccctc

SEQ ID NO: 52120 - DNA, 15 bp, Homo sapiens
cagagggcaccctct

SEQ ID NO: 52121 - DNA, 15 bp, Homo sapiens
agagggcaccctcta

SEQ ID NO: 52122 - DNA, 15 bp, Homo sapiens
gagggcaccctctac

SEQ ID NO: 52123 - DNA, 15 bp, Homo sapiens
agggcaccctctacc

SEQ ID NO: 52124 - DNA, 15 bp, Homo sapiens
gggcaccctctacct

SEQ ID NO: 52125 - DNA, 15 bp, Homo sapiens
ggcaccctctacctt

SEQ ID NO: 52126 - DNA, 15 bp, Homo sapiens
gcaccctctaccttc

SEQ ID NO: 52127 - DNA, 15 bp, Homo sapiens
caccctctaccttcc

SEQ ID NO: 52128 - DNA, 15 bp, Homo sapiens
accctctaccttccc

SEQ ID NO: 52129 - DNA, 15 bp, Homo sapiens
ccctctaccttccct

SEQ ID NO: 52130 - DNA, 15 bp, Homo sapiens
cctctaccttcccta

SEQ ID NO: 52131 - DNA, 15 bp, Homo sapiens
ctctaccttccctag

SEQ ID NO: 52132 - DNA, 15 bp, Homo sapiens
tctaccttccctagc

SEQ ID NO: 52133 - DNA, 15 bp, Homo sapiens
ctaccttccctagct

SEQ ID NO: 52134 - DNA, 15 bp, Homo sapiens
taccttccctagctt

SEQ ID NO: 52135 - DNA, 15 bp, Homo sapiens
accttccctagcttc

SEQ ID NO: 52136 - DNA, 15 bp, Homo sapiens
ccttccctagcttcg

SEQ ID NO: 52137 - DNA, 15 bp, Homo sapiens
cttccctagcttcgt

SEQ ID NO: 52138 - DNA, 15 bp, Homo sapiens
ttccctagcttcgtt

SEQ ID NO: 52139 - DNA, 15 bp, Homo sapiens
tccctagcttcgttc

SEQ ID NO: 52140 - DNA, 15 bp, Homo sapiens
ccctagcttcgttct

SEQ ID NO: 52141 - DNA, 15 bp, Homo sapiens
cctagcttcgttctc

SEQ ID NO: 52142 - DNA, 15 bp, Homo sapiens
ctagcttcgttctct

SEQ ID NO: 52143 - DNA, 15 bp, Homo sapiens
tagcttcgttctctg

SEQ ID NO: 52144 - DNA, 15 bp, Homo sapiens
agcttcgttctctgg

SEQ ID NO: 52145 - DNA, 15 bp, Homo sapiens
gcttcgttctctggg

SEQ ID NO: 52146 - DNA, 15 bp, Homo sapiens
cttcgttctctgggt

SEQ ID NO: 52147 - DNA, 15 bp, Homo sapiens
ttcgttctctgggtc

SEQ ID NO: 52148 - DNA, 15 bp, Homo sapiens
tcgttctctgggtcc

SEQ ID NO: 52149 - DNA, 15 bp, Homo sapiens
cgttctctgggtccc

SEQ ID NO: 52150 - DNA, 15 bp, Homo sapiens
gttctctgggtcccc

SEQ ID NO: 52151 - DNA, 15 bp, Homo sapiens
ttctctgggtcccct

SEQ ID NO: 52152 - DNA, 15 bp, Homo sapiens
tctctgggtcccctc

SEQ ID NO: 52153 - DNA, 15 bp, Homo sapiens
ctctgggtcccctcc

SEQ ID NO: 52154 - DNA, 15 bp, Homo sapiens
tctgggtcccctcct

SEQ ID NO: 52155 - DNA, 15 bp, Homo sapiens
ctgggtcccctcctc

SEQ ID NO: 52156 - DNA, 15 bp, Homo sapiens
tgggtcccctcctcc

SEQ ID NO: 52157 - DNA, 15 bp, Homo sapiens
gggtcccctcctcct

SEQ ID NO: 52158 - DNA, 15 bp, Homo sapiens
ggtcccctcctcctc

SEQ ID NO: 52159 - DNA, 15 bp, Homo sapiens
gtcccctcctcctcc

SEQ ID NO: 52160 - DNA, 15 bp, Homo sapiens
tcccctcctcctcct

SEQ ID NO: 52161 - DNA, 15 bp, Homo sapiens
cccctcctcctcctc

SEQ ID NO: 52162 - DNA, 15 bp, Homo sapiens
ccctcctcctcctcg

SEQ ID NO: 52163 - DNA, 15 bp, Homo sapiens
cctcctcctcctcgc

SEQ ID NO: 52164 - DNA, 15 bp, Homo sapiens
ctcctcctcctcgcc

SEQ ID NO: 52165 - DNA, 15 bp, Homo sapiens
tcctcctcctcgcct

SEQ ID NO: 52166 - DNA, 15 bp, Homo sapiens
cctcctcctcgcctc

SEQ ID NO: 52167 - DNA, 15 bp, Homo sapiens
ctcctcctcgcctcc

SEQ ID NO: 52168 - DNA, 15 bp, Homo sapiens
tcctcctcgcctccc

SEQ ID NO: 52169 - DNA, 15 bp, Homo sapiens
cctcctcgcctcccc

SEQ ID NO: 52170 - DNA, 15 bp, Homo sapiens
ctcctcgcctcccct

SEQ ID NO: 52171 - DNA, 15 bp, Homo sapiens
tcctcgcctcccctc

SEQ ID NO: 52172 - DNA, 15 bp, Homo sapiens
cctcgcctcccctcc

SEQ ID NO: 52173 - DNA, 15 bp, Homo sapiens
ctcgcctcccctcca

SEQ ID NO: 52174 - DNA, 15 bp, Homo sapiens
tcgcctcccctccac

SEQ ID NO: 52175 - DNA, 15 bp, Homo sapiens
cgcctcccctccacc

SEQ ID NO: 52176 - DNA, 15 bp, Homo sapiens
gcctcccctccaccc

SEQ ID NO: 52177 - DNA, 15 bp, Homo sapiens
cctcccctccacccc

SEQ ID NO: 52178 - DNA, 15 bp, Homo sapiens
ctcccctccaccccg

SEQ ID NO: 52179 - DNA, 15 bp, Homo sapiens
tcccctccaccccgg

SEQ ID NO: 52180 - DNA, 15 bp, Homo sapiens
cccctccaccccggt

SEQ ID NO: 52181 - DNA, 15 bp, Homo sapiens
ccctccaccccggtc

SEQ ID NO: 52182 - DNA, 15 bp, Homo sapiens
cctccaccccggtcc

SEQ ID NO: 52183 - DNA, 15 bp, Homo sapiens
ctccaccccggtccc

SEQ ID NO: 52184 - DNA, 15 bp, Homo sapiens
tccaccccggtccct

SEQ ID NO: 52185 - DNA, 15 bp, Homo sapiens
ccaccccggtccctc

SEQ ID NO: 52186 - DNA, 15 bp, Homo sapiens
caccccggtccctca

SEQ ID NO: 52187 - DNA, 15 bp, Homo sapiens
accccggtccctcat

SEQ ID NO: 52188 - DNA, 15 bp, Homo sapiens
ccccggtccctcatc

SEQ ID NO: 52189 - DNA, 15 bp, Homo sapiens
cccggtccctcatcc

SEQ ID NO: 52190 - DNA, 15 bp, Homo sapiens
ccggtccctcatccc

SEQ ID NO: 52191 - DNA, 15 bp, Homo sapiens
cggtccctcatcccc

SEQ ID NO: 52192 - DNA, 15 bp, Homo sapiens
ggtccctcatccccg

SEQ ID NO: 52193 - DNA, 15 bp, Homo sapiens
gtccctcatccccgc

SEQ ID NO: 52194 - DNA, 15 bp, Homo sapiens
tccctcatccccgct

SEQ ID NO: 52195 - DNA, 15 bp, Homo sapiens
ccctcatccccgctc

SEQ ID NO: 52196 - DNA, 15 bp, Homo sapiens
cctcatccccgctct

SEQ ID NO: 52197 - DNA, 15 bp, Homo sapiens
ctcatccccgctcta

SEQ ID NO: 52198 - DNA, 15 bp, Homo sapiens
tcatccccgctctac

SEQ ID NO: 52199 - DNA, 15 bp, Homo sapiens
catccccgctctacc

SEQ ID NO: 52200 - DNA, 15 bp, Homo sapiens
atccccgctctaccc

SEQ ID NO: 52201 - DNA, 15 bp, Homo sapiens
tccccgctctacccc

SEQ ID NO: 52202 - DNA, 15 bp, Homo sapiens
ccccgctctaccccc

SEQ ID NO: 52203 - DNA, 15 bp, Homo sapiens
cccgctctaccccca

SEQ ID NO: 52204 - DNA, 15 bp, Homo sapiens
ccgctctacccccaa

SEQ ID NO: 52205 - DNA, 15 bp, Homo sapiens
cgctctacccccaac

SEQ ID NO: 52206 - DNA, 15 bp, Homo sapiens
gctctacccccaaca

SEQ ID NO: 52207 - DNA, 15 bp, Homo sapiens
ctctacccccaacac

SEQ ID NO: 52208 - DNA, 15 bp, Homo sapiens
tctacccccaacaca

SEQ ID NO: 52209 - DNA, 15 bp, Homo sapiens
ctacccccaacacac

SEQ ID NO: 52210 - DNA, 15 bp, Homo sapiens
tacccccaacacaca

SEQ ID NO: 52211 - DNA, 15 bp, Homo sapiens
acccccaacacacaa

SEQ ID NO: 52212 - DNA, 15 bp, Homo sapiens
cccccaacacacaaa

SEQ ID NO: 52213 - DNA, 15 bp, Homo sapiens
ccccaacacacaaac

SEQ ID NO: 52214 - DNA, 15 bp, Homo sapiens
cccaacacacaaaca

SEQ ID NO: 52215 - DNA, 15 bp, Homo sapiens
ccaacacacaaacac

SEQ ID NO: 52216 - DNA, 15 bp, Homo sapiens
caacacacaaacact

SEQ ID NO: 52217 - DNA, 15 bp, Homo sapiens
aacacacaaacactg

SEQ ID NO: 52218 - DNA, 15 bp, Homo sapiens
acacacaaacactgc

SEQ ID NO: 52219 - DNA, 15 bp, Homo sapiens
cacacaaacactgca

SEQ ID NO: 52220 - DNA, 15 bp, Homo sapiens
acacaaacactgcat

SEQ ID NO: 52221 - DNA, 15 bp, Homo sapiens
cacaaacactgcatc

SEQ ID NO: 52222 - DNA, 15 bp, Homo sapiens
acaaacactgcatcc

SEQ ID NO: 52223 - DNA, 15 bp, Homo sapiens
caaacactgcatcct

SEQ ID NO: 52224 - DNA, 15 bp, Homo sapiens
aaacactgcatcctc

SEQ ID NO: 52225 - DNA, 15 bp, Homo sapiens
aacactgcatcctcc

SEQ ID NO: 52226 - DNA, 15 bp, Homo sapiens
acactgcatcctcca

SEQ ID NO: 52227 - DNA, 15 bp, Homo sapiens
cactgcatcctccag

SEQ ID NO: 52228 - DNA, 15 bp, Homo sapiens
actgcatcctccagt

SEQ ID NO: 52229 - DNA, 15 bp, Homo sapiens
ctgcatcctccagtt

SEQ ID NO: 52230 - DNA, 15 bp, Homo sapiens
tgcatcctccagttc

SEQ ID NO: 52231 - DNA, 15 bp, Homo sapiens
gcatcctccagttca

SEQ ID NO: 52232 - DNA, 15 bp, Homo sapiens
catcctccagttcac

SEQ ID NO: 52233 - DNA, 15 bp, Homo sapiens
atcctccagttcacc

SEQ ID NO: 52234 - DNA, 15 bp, Homo sapiens
tcctccagttcaccc

SEQ ID NO: 52235 - DNA, 15 bp, Homo sapiens
cctccagttcaccct

SEQ ID NO: 52236 - DNA, 15 bp, Homo sapiens
ctccagttcaccctc

SEQ ID NO: 52237 - DNA, 15 bp, Homo sapiens
tccagttcaccctcg

SEQ ID NO: 52238 - DNA, 15 bp, Homo sapiens
ccagttcaccctcgc

SEQ ID NO: 52239 - DNA, 15 bp, Homo sapiens
cagttcaccctcgca

SEQ ID NO: 52240 - DNA, 15 bp, Homo sapiens
agttcaccctcgcag

SEQ ID NO: 52241 - DNA, 15 bp, Homo sapiens
gttcaccctcgcagc

SEQ ID NO: 52242 - DNA, 15 bp, Homo sapiens
ttcaccctcgcagcc

SEQ ID NO: 52243 - DNA, 15 bp, Homo sapiens
tcaccctcgcagccc

SEQ ID NO: 52244 - DNA, 15 bp, Homo sapiens
caccctcgcagcccc

SEQ ID NO: 52245 - DNA, 15 bp, Homo sapiens
accctcgcagccccg

SEQ ID NO: 52246 - DNA, 15 bp, Homo sapiens
ccctcgcagccccga

SEQ ID NO: 52247 - DNA, 15 bp, Homo sapiens
cctcgcagccccgag

SEQ ID NO: 52248 - DNA, 15 bp, Homo sapiens
ctcgcagccccgagg

SEQ ID NO: 52249 - DNA, 15 bp, Homo sapiens
tcgcagccccgaggc

SEQ ID NO: 52250 - DNA, 15 bp, Homo sapiens
cgcagccccgaggct

SEQ ID NO: 52251 - DNA, 15 bp, Homo sapiens
gcagccccgaggctt

SEQ ID NO: 52252 - DNA, 15 bp, Homo sapiens
cagccccgaggcttc

SEQ ID NO: 52253 - DNA, 15 bp, Homo sapiens
agccccgaggcttct

SEQ ID NO: 52254 - DNA, 15 bp, Homo sapiens
gccccgaggcttctt

SEQ ID NO: 52255 - DNA, 15 bp, Homo sapiens
ccccgaggcttcttc

SEQ ID NO: 52256 - DNA, 15 bp, Homo sapiens
cccgaggcttcttcc

SEQ ID NO: 52257 - DNA, 15 bp, Homo sapiens
ccgaggcttcttcct

SEQ ID NO: 52258 - DNA, 15 bp, Homo sapiens
cgaggcttcttcctt

SEQ ID NO: 52259 - DNA, 15 bp, Homo sapiens
gaggcttcttcctta

SEQ ID NO: 52260 - DNA, 15 bp, Homo sapiens
aggcttcttccttag

SEQ ID NO: 52261 - DNA, 15 bp, Homo sapiens
ggcttcttccttagg

SEQ ID NO: 52262 - DNA, 15 bp, Homo sapiens
gcttcttccttaggg

SEQ ID NO: 52263 - DNA, 15 bp, Homo sapiens
cttcttccttaggga

SEQ ID NO: 52264 - DNA, 15 bp, Homo sapiens
ttcttccttagggat

SEQ ID NO: 52265 - DNA, 15 bp, Homo sapiens
tcttccttagggatg

SEQ ID NO: 52266 - DNA, 15 bp, Homo sapiens
cttccttagggatgc

SEQ ID NO: 52267 - DNA, 15 bp, Homo sapiens
ttccttagggatgcc

SEQ ID NO: 52268 - DNA, 15 bp, Homo sapiens
tccttagggatgccc

SEQ ID NO: 52269 - DNA, 15 bp, Homo sapiens
ccttagggatgcccc

SEQ ID NO: 52270 - DNA, 15 bp, Homo sapiens
cttagggatgcccct

SEQ ID NO: 52271 - DNA, 15 bp, Homo sapiens
ttagggatgccccta

SEQ ID NO: 52272 - DNA, 15 bp, Homo sapiens
tagggatgcccctag

SEQ ID NO: 52273 - DNA, 15 bp, Homo sapiens
agggatgcccctagt

SEQ ID NO: 52274 - DNA, 15 bp, Homo sapiens
gggatgcccctagtc

SEQ ID NO: 52275 - DNA, 15 bp, Homo sapiens
ggatgcccctagtct

SEQ ID NO: 52276 - DNA, 15 bp, Homo sapiens
gatgcccctagtctg

SEQ ID NO: 52277 - DNA, 15 bp, Homo sapiens
atgcccctagtctgt

SEQ ID NO: 52278 - DNA, 15 bp, Homo sapiens
tgcccctagtctgta

SEQ ID NO: 52279 - DNA, 15 bp, Homo sapiens
gcccctagtctgtaa

SEQ ID NO: 52280 - DNA, 15 bp, Homo sapiens
cccctagtctgtaat

SEQ ID NO: 52281 - DNA, 15 bp, Homo sapiens
ccctagtctgtaatc

SEQ ID NO: 52282 - DNA, 15 bp, Homo sapiens
cctagtctgtaatct

SEQ ID NO: 52283 - DNA, 15 bp, Homo sapiens
ctagtctgtaatctc

SEQ ID NO: 52284 - DNA, 15 bp, Homo sapiens
tagtctgtaatctcc

SEQ ID NO: 52285 - DNA, 15 bp, Homo sapiens
agtctgtaatctccc

SEQ ID NO: 52286 - DNA, 15 bp, Homo sapiens
gtctgtaatctcccc

SEQ ID NO: 52287 - DNA, 15 bp, Homo sapiens
tctgtaatctcccct

SEQ ID NO: 52288 - DNA, 15 bp, Homo sapiens
ctgtaatctcccctt

SEQ ID NO: 52289 - DNA, 15 bp, Homo sapiens
tgtaatctccccttc

SEQ ID NO: 52290 - DNA, 15 bp, Homo sapiens
gtaatctccccttct

SEQ ID NO: 52291 - DNA, 15 bp, Homo sapiens
taatctccccttctt

SEQ ID NO: 52292 - DNA, 15 bp, Homo sapiens
aatctccccttcttc

SEQ ID NO: 52293 - DNA, 15 bp, Homo sapiens
atctccccttcttct

SEQ ID NO: 52294 - DNA, 15 bp, Homo sapiens
tctccccttcttctt

SEQ ID NO: 52295 - DNA, 15 bp, Homo sapiens
ctccccttcttcttg

SEQ ID NO: 52296 - DNA, 15 bp, Homo sapiens
tccccttcttcttgc

SEQ ID NO: 52297 - DNA, 15 bp, Homo sapiens
ccccttcttcttgcc

SEQ ID NO: 52298 - DNA, 15 bp, Homo sapiens
cccttcttcttgccc

SEQ ID NO: 52299 - DNA, 15 bp, Homo sapiens
ccttcttcttgcccg

SEQ ID NO: 52300 - DNA, 15 bp, Homo sapiens
cttcttcttgcccgt

SEQ ID NO: 52301 - DNA, 15 bp, Homo sapiens
ttcttcttgcccgtc

SEQ ID NO: 52302 - DNA, 15 bp, Homo sapiens
tcttcttgcccgtca

SEQ ID NO: 52303 - DNA, 15 bp, Homo sapiens
cttcttgcccgtcag

SEQ ID NO: 52304 - DNA, 15 bp, Homo sapiens
ttcttgcccgtcagg

SEQ ID NO: 52305 - DNA, 15 bp, Homo sapiens
tcttgcccgtcaggc

SEQ ID NO: 52306 - DNA, 15 bp, Homo sapiens
cttgcccgtcaggca

SEQ ID NO: 52307 - DNA, 15 bp, Homo sapiens
ttgcccgtcaggcac

SEQ ID NO: 52308 - DNA, 15 bp, Homo sapiens
tgcccgtcaggcaca

SEQ ID NO: 52309 - DNA, 15 bp, Homo sapiens
gcccgtcaggcacag

SEQ ID NO: 52310 - DNA, 15 bp, Homo sapiens
cccgtcaggcacaga

SEQ ID NO: 52311 - DNA, 15 bp, Homo sapiens
ccgtcaggcacagag

SEQ ID NO: 52312 - DNA, 15 bp, Homo sapiens
cgtcaggcacagagc

SEQ ID NO: 52313 - DNA, 15 bp, Homo sapiens
gtcaggcacagagcc

SEQ ID NO: 52314 - DNA, 15 bp, Homo sapiens
tcaggcacagagccc

SEQ ID NO: 52315 - DNA, 15 bp, Homo sapiens
caggcacagagcccc

SEQ ID NO: 52316 - DNA, 15 bp, Homo sapiens
aggcacagagccccc

SEQ ID NO: 52317 - DNA, 15 bp, Homo sapiens
ggcacagagccccca

SEQ ID NO: 52318 - DNA, 15 bp, Homo sapiens
gcacagagcccccaa

SEQ ID NO: 52319 - DNA, 15 bp, Homo sapiens
cacagagcccccaat

SEQ ID NO: 52320 - DNA, 15 bp, Homo sapiens
acagagcccccaatc

SEQ ID NO: 52321 - DNA, 15 bp, Homo sapiens
cagagcccccaatcc

SEQ ID NO: 52322 - DNA, 15 bp, Homo sapiens
agagcccccaatcct

SEQ ID NO: 52323 - DNA, 15 bp, Homo sapiens
gagcccccaatcctc

SEQ ID NO: 52324 - DNA, 15 bp, Homo sapiens
agcccccaatcctca

SEQ ID NO: 52325 - DNA, 15 bp, Homo sapiens
gcccccaatcctcag

SEQ ID NO: 52326 - DNA, 15 bp, Homo sapiens
cccccaatcctcagc

SEQ ID NO: 52327 - DNA, 15 bp, Homo sapiens
ccccaatcctcagct

SEQ ID NO: 52328 - DNA, 15 bp, Homo sapiens
cccaatcctcagcta

SEQ ID NO: 52329 - DNA, 15 bp, Homo sapiens
ccaatcctcagctat

SEQ ID NO: 52330 - DNA, 15 bp, Homo sapiens
caatcctcagctatt

SEQ ID NO: 52331 - DNA, 15 bp, Homo sapiens
aatcctcagctattt

SEQ ID NO: 52332 - DNA, 15 bp, Homo sapiens
atcctcagctatttc

SEQ ID NO: 52333 - DNA, 15 bp, Homo sapiens
tcctcagctatttct

SEQ ID NO: 52334 - DNA, 15 bp, Homo sapiens
cctcagctatttctt

SEQ ID NO: 52335 - DNA, 15 bp, Homo sapiens
ctcagctatttcttt

SEQ ID NO: 52336 - DNA, 15 bp, Homo sapiens
tcagctatttctttc

SEQ ID NO: 52337 - DNA, 15 bp, Homo sapiens
cagctatttctttcc

SEQ ID NO: 52338 - DNA, 15 bp, Homo sapiens
agctatttctttcca

SEQ ID NO: 52339 - DNA, 15 bp, Homo sapiens
gctatttctttccag

SEQ ID NO: 52340 - DNA, 15 bp, Homo sapiens
ctatttctttccagg

SEQ ID NO: 52341 - DNA, 15 bp, Homo sapiens
tatttctttccagga

SEQ ID NO: 52342 - DNA, 15 bp, Homo sapiens
atttctttccaggag

SEQ ID NO: 52343 - DNA, 15 bp, Homo sapiens
tttctttccaggagt

SEQ ID NO: 52344 - DNA, 15 bp, Homo sapiens
ttctttccaggagta

SEQ ID NO: 52345 - DNA, 15 bp, Homo sapiens
tctttccaggagtaa

SEQ ID NO: 52346 - DNA, 15 bp, Homo sapiens
ctttccaggagtaac

SEQ ID NO: 52347 - DNA, 15 bp, Homo sapiens
tttccaggagtaact

SEQ ID NO: 52348 - DNA, 15 bp, Homo sapiens
ttccaggagtaactc

SEQ ID NO: 52349 - DNA, 15 bp, Homo sapiens
tccaggagtaactca

SEQ ID NO: 52350 - DNA, 15 bp, Homo sapiens
ccaggagtaactcac

SEQ ID NO: 52351 - DNA, 15 bp, Homo sapiens
caggagtaactcact

SEQ ID NO: 52352 - DNA, 15 bp, Homo sapiens
aggagtaactcactc

SEQ ID NO: 52353 - DNA, 15 bp, Homo sapiens
ggagtaactcactca

SEQ ID NO: 52354 - DNA, 15 bp, Homo sapiens
gagtaactcactcac

SEQ ID NO: 52355 - DNA, 15 bp, Homo sapiens
agtaactcactcacc

SEQ ID NO: 52356 - DNA, 15 bp, Homo sapiens
gtaactcactcaccc

SEQ ID NO: 52357 - DNA, 15 bp, Homo sapiens
taactcactcaccca

SEQ ID NO: 52358 - DNA, 15 bp, Homo sapiens
aactcactcacccat

SEQ ID NO: 52359 - DNA, 15 bp, Homo sapiens
actcactcacccatt

SEQ ID NO: 52360 - DNA, 15 bp, Homo sapiens
ctcactcacccattc

SEQ ID NO: 52361 - DNA, 15 bp, Homo sapiens
tcactcacccattcc

SEQ ID NO: 52362 - DNA, 15 bp, Homo sapiens
cactcacccattcct

SEQ ID NO: 52363 - DNA, 15 bp, Homo sapiens
actcacccattcctc

SEQ ID NO: 52364 - DNA, 15 bp, Homo sapiens
ctcacccattcctct

SEQ ID NO: 52365 - DNA, 15 bp, Homo sapiens
tcacccattcctctt

SEQ ID NO: 52366 - DNA, 15 bp, Homo sapiens
cacccattcctcttc

SEQ ID NO: 52367 - DNA, 15 bp, Homo sapiens
acccattcctcttcc

SEQ ID NO: 52368 - DNA, 15 bp, Homo sapiens
cccattcctcttccc

SEQ ID NO: 52369 - DNA, 15 bp, Homo sapiens
ccattcctcttcccg

SEQ ID NO: 52370 - DNA, 15 bp, Homo sapiens
cattcctcttcccgg

SEQ ID NO: 52371 - DNA, 15 bp, Homo sapiens
attcctcttcccggc

SEQ ID NO: 52372 - DNA, 15 bp, Homo sapiens
ttcctcttcccggct

SEQ ID NO: 52373 - DNA, 15 bp, Homo sapiens
tcctcttcccggctc

SEQ ID NO: 52374 - DNA, 15 bp, Homo sapiens
cctcttcccggctct

SEQ ID NO: 52375 - DNA, 15 bp, Homo sapiens
ctcttcccggctctg

SEQ ID NO: 52376 - DNA, 15 bp, Homo sapiens
tcttcccggctctgc

SEQ ID NO: 52377 - DNA, 15 bp, Homo sapiens
cttcccggctctgca

SEQ ID NO: 52378 - DNA, 15 bp, Homo sapiens
ttcccggctctgcat

SEQ ID NO: 52379 - DNA, 15 bp, Homo sapiens
tcccggctctgcatc

SEQ ID NO: 52380 - DNA, 15 bp, Homo sapiens
cccggctctgcatcc

SEQ ID NO: 52381 - DNA, 15 bp, Homo sapiens
ccggctctgcatccc

SEQ ID NO: 52382 - DNA, 15 bp, Homo sapiens
cggctctgcatcccc

SEQ ID NO: 52383 - DNA, 15 bp, Homo sapiens
ggctctgcatcccca

SEQ ID NO: 52384 - DNA, 15 bp, Homo sapiens
gctctgcatccccag

SEQ ID NO: 52385 - DNA, 15 bp, Homo sapiens
ctctgcatccccaga

SEQ ID NO: 52386 - DNA, 15 bp, Homo sapiens
tctgcatccccagag

SEQ ID NO: 52387 - DNA, 15 bp, Homo sapiens
ctgcatccccagaga

SEQ ID NO: 52388 - DNA, 15 bp, Homo sapiens
tgcatccccagagac

SEQ ID NO: 52389 - DNA, 15 bp, Homo sapiens
gcatccccagagact

SEQ ID NO: 52390 - DNA, 15 bp, Homo sapiens
catccccagagacta

SEQ ID NO: 52391 - DNA, 15 bp, Homo sapiens
atccccagagactaa

SEQ ID NO: 52392 - DNA, 15 bp, Homo sapiens
tccccagagactaac

SEQ ID NO: 52393 - DNA, 15 bp, Homo sapiens
ccccagagactaacc

SEQ ID NO: 52394 - DNA, 15 bp, Homo sapiens
cccagagactaaccc

SEQ ID NO: 52395 - DNA, 15 bp, Homo sapiens
ccagagactaacccg

SEQ ID NO: 52396 - DNA, 15 bp, Homo sapiens
cagagactaacccga

SEQ ID NO: 52397 - DNA, 15 bp, Homo sapiens
agagactaacccgag

SEQ ID NO: 52398 - DNA, 15 bp, Homo sapiens
gagactaacccgagt

SEQ ID NO: 52399 - DNA, 15 bp, Homo sapiens
agactaacccgagtc

SEQ ID NO: 52400 - DNA, 15 bp, Homo sapiens
gactaacccgagtca

SEQ ID NO: 52401 - DNA, 15 bp, Homo sapiens
actaacccgagtcaa

SEQ ID NO: 52402 - DNA, 15 bp, Homo sapiens
ctaacccgagtcaag

SEQ ID NO: 52403 - DNA, 15 bp, Homo sapiens
taacccgagtcaaga

SEQ ID NO: 52404 - DNA, 15 bp, Homo sapiens
aacccgagtcaagaa

SEQ ID NO: 52405 - DNA, 15 bp, Homo sapiens
acccgagtcaagaat

SEQ ID NO: 52406 - DNA, 15 bp, Homo sapiens
cccgagtcaagaatc

SEQ ID NO: 52407 - DNA, 15 bp, Homo sapiens
ccgagtcaagaatcc

SEQ ID NO: 52408 - DNA, 15 bp, Homo sapiens
cgagtcaagaatccc

SEQ ID NO: 52409 - DNA, 15 bp, Homo sapiens
gagtcaagaatcccc

SEQ ID NO: 52410 - DNA, 15 bp, Homo sapiens
agtcaagaatccccc

SEQ ID NO: 52411 - DNA, 15 bp, Homo sapiens
gtcaagaatccccca

SEQ ID NO: 52412 - DNA, 15 bp, Homo sapiens
tcaagaatcccccac

SEQ ID NO: 52413 - DNA, 15 bp, Homo sapiens
caagaatcccccacg

SEQ ID NO: 52414 - DNA, 15 bp, Homo sapiens
aagaatcccccacgt

SEQ ID NO: 52415 - DNA, 15 bp, Homo sapiens
agaatcccccacgta

SEQ ID NO: 52416 - DNA, 15 bp, Homo sapiens
gaatcccccacgtac

SEQ ID NO: 52417 - DNA, 15 bp, Homo sapiens
aatcccccacgtaca

SEQ ID NO: 52418 - DNA, 15 bp, Homo sapiens
atcccccacgtacat

SEQ ID NO: 52419 - DNA, 15 bp, Homo sapiens
tcccccacgtacatc

SEQ ID NO: 52420 - DNA, 15 bp, Homo sapiens
cccccacgtacatcc

SEQ ID NO: 52421 - DNA, 15 bp, Homo sapiens
ccccacgtacatccc

SEQ ID NO: 52422 - DNA, 15 bp, Homo sapiens
cccacgtacatccca

SEQ ID NO: 52423 - DNA, 15 bp, Homo sapiens
ccacgtacatcccaa

SEQ ID NO: 52424 - DNA, 15 bp, Homo sapiens
cacgtacatcccaac

SEQ ID NO: 52425 - DNA, 15 bp, Homo sapiens
acgtacatcccaacc

SEQ ID NO: 52426 - DNA, 15 bp, Homo sapiens
cgtacatcccaacca

SEQ ID NO: 52427 - DNA, 15 bp, Homo sapiens
gtacatcccaaccac

SEQ ID NO: 52428 - DNA, 15 bp, Homo sapiens
tacatcccaaccact

SEQ ID NO: 52429 - DNA, 15 bp, Homo sapiens
acatcccaaccactc

SEQ ID NO: 52430 - DNA, 15 bp, Homo sapiens
catcccaaccactcc

SEQ ID NO: 52431 - DNA, 15 bp, Homo sapiens
atcccaaccactccc

SEQ ID NO: 52432 - DNA, 15 bp, Homo sapiens
tcccaaccactcccc

SEQ ID NO: 52433 - DNA, 15 bp, Homo sapiens
cccaaccactccccg

SEQ ID NO: 52434 - DNA, 15 bp, Homo sapiens
ccaaccactccccga

SEQ ID NO: 52435 - DNA, 15 bp, Homo sapiens
caaccactccccgaa

SEQ ID NO: 52436 - DNA, 15 bp, Homo sapiens
aaccactccccgaaa

SEQ ID NO: 52437 - DNA, 15 bp, Homo sapiens
accactccccgaaag

SEQ ID NO: 52438 - DNA, 15 bp, Homo sapiens
ccactccccgaaagt

SEQ ID NO: 52439 - DNA, 15 bp, Homo sapiens
cactccccgaaagtc

SEQ ID NO: 52440 - DNA, 15 bp, Homo sapiens
actccccgaaagtca

SEQ ID NO: 52441 - DNA, 15 bp, Homo sapiens
ctccccgaaagtcaa

SEQ ID NO: 52442 - DNA, 15 bp, Homo sapiens
tccccgaaagtcaaa

SEQ ID NO: 52443 - DNA, 15 bp, Homo sapiens
ccccgaaagtcaaaa

SEQ ID NO: 52444 - DNA, 15 bp, Homo sapiens
cccgaaagtcaaaac

SEQ ID NO: 52445 - DNA, 15 bp, Homo sapiens
ccgaaagtcaaaact

SEQ ID NO: 52446 - DNA, 15 bp, Homo sapiens
cgaaagtcaaaactc

SEQ ID NO: 52447 - DNA, 15 bp, Homo sapiens
gaaagtcaaaactct

SEQ ID NO: 52448 - DNA, 15 bp, Homo sapiens
aaagtcaaaactctt

SEQ ID NO: 52449 - DNA, 15 bp, Homo sapiens
aagtcaaaactctta

SEQ ID NO: 52450 - DNA, 15 bp, Homo sapiens
agtcaaaactcttaa

SEQ ID NO: 52451 - DNA, 15 bp, Homo sapiens
gtcaaaactcttaac

SEQ ID NO: 52452 - DNA, 15 bp, Homo sapiens
tcaaaactcttaact

SEQ ID NO: 52453 - DNA, 15 bp, Homo sapiens
caaaactcttaactt

SEQ ID NO: 52454 - DNA, 15 bp, Homo sapiens
aaaactcttaacttc

SEQ ID NO: 52455 - DNA, 15 bp, Homo sapiens
aaactcttaacttcc

SEQ ID NO: 52456 - DNA, 15 bp, Homo sapiens
aactcttaacttccc

SEQ ID NO: 52457 - DNA, 15 bp, Homo sapiens
actcttaacttccct

SEQ ID NO: 52458 - DNA, 15 bp, Homo sapiens
ctcttaacttccctg

SEQ ID NO: 52459 - DNA, 15 bp, Homo sapiens
tcttaacttccctgg

SEQ ID NO: 52460 - DNA, 15 bp, Homo sapiens
cttaacttccctgga

SEQ ID NO: 52461 - DNA, 15 bp, Homo sapiens
ttaacttccctggag

SEQ ID NO: 52462 - DNA, 15 bp, Homo sapiens
taacttccctggagg

SEQ ID NO: 52463 - DNA, 15 bp, Homo sapiens
aacttccctggaggg

SEQ ID NO: 52464 - DNA, 15 bp, Homo sapiens
acttccctggagggc

SEQ ID NO: 52465 - DNA, 15 bp, Homo sapiens
cttccctggagggcg

SEQ ID NO: 52466 - DNA, 15 bp, Homo sapiens
ttccctggagggcgc

SEQ ID NO: 52467 - DNA, 15 bp, Homo sapiens
tccctggagggcgct

SEQ ID NO: 52468 - DNA, 15 bp, Homo sapiens
ccctggagggcgctt

SEQ ID NO: 52469 - DNA, 15 bp, Homo sapiens
cctggagggcgcttc

SEQ ID NO: 52470 - DNA, 15 bp, Homo sapiens
ctggagggcgcttca

SEQ ID NO: 52471 - DNA, 15 bp, Homo sapiens
tggagggcgcttcag

SEQ ID NO: 52472 - DNA, 15 bp, Homo sapiens
ggagggcgcttcaga

SEQ ID NO: 52473 - DNA, 15 bp, Homo sapiens
gagggcgcttcagaa

SEQ ID NO: 52474 - DNA, 15 bp, Homo sapiens
agggcgcttcagaag

SEQ ID NO: 52475 - DNA, 15 bp, Homo sapiens
gggcgcttcagaaga

SEQ ID NO: 52476 - DNA, 15 bp, Homo sapiens
ggcgcttcagaagag

SEQ ID NO: 52477 - DNA, 15 bp, Homo sapiens
gcgcttcagaagagg

SEQ ID NO: 52478 - DNA, 15 bp, Homo sapiens
cgcttcagaagaggg

SEQ ID NO: 52479 - DNA, 15 bp, Homo sapiens
gcttcagaagagggg

SEQ ID NO: 52480 - DNA, 15 bp, Homo sapiens
cttcagaagaggggc

SEQ ID NO: 52481 - DNA, 15 bp, Homo sapiens
ttcagaagaggggcg

SEQ ID NO: 52482 - DNA, 15 bp, Homo sapiens
tcagaagaggggcgc

SEQ ID NO: 52483 - DNA, 15 bp, Homo sapiens
cagaagaggggcgca

SEQ ID NO: 52484 - DNA, 15 bp, Homo sapiens
agaagaggggcgcag

SEQ ID NO: 52485 - DNA, 15 bp, Homo sapiens
gaagaggggcgcagg

SEQ ID NO: 52486 - DNA, 15 bp, Homo sapiens
aagaggggcgcagga

SEQ ID NO: 52487 - DNA, 15 bp, Homo sapiens
agaggggcgcaggat

SEQ ID NO: 52488 - DNA, 15 bp, Homo sapiens
gaggggcgcaggatg

SEQ ID NO: 52489 - DNA, 15 bp, Homo sapiens
aggggcgcaggatgg

SEQ ID NO: 52490 - DNA, 15 bp, Homo sapiens
ggggcgcaggatggg

SEQ ID NO: 52491 - DNA, 15 bp, Homo sapiens
gggcgcaggatgggt

SEQ ID NO: 52492 - DNA, 15 bp, Homo sapiens
ggcgcaggatgggta

SEQ ID NO: 52493 - DNA, 15 bp, Homo sapiens
gcgcaggatgggtag

SEQ ID NO: 52494 - DNA, 15 bp, Homo sapiens
cgcaggatgggtaga

SEQ ID NO: 52495 - DNA, 15 bp, Homo sapiens
gcaggatgggtagag

SEQ ID NO: 52496 - DNA, 15 bp, Homo sapiens
caggatgggtagaga

SEQ ID NO: 52497 - DNA, 15 bp, Homo sapiens
aggatgggtagagat

SEQ ID NO: 52498 - DNA, 15 bp, Homo sapiens
ggatgggtagagatg

SEQ ID NO: 52499 - DNA, 15 bp, Homo sapiens
gatgggtagagatgt

SEQ ID NO: 52500 - DNA, 15 bp, Homo sapiens
atgggtagagatgtg

SEQ ID NO: 52501 - DNA, 15 bp, Homo sapiens
tgggtagagatgtgg

SEQ ID NO: 52502 - DNA, 15 bp, Homo sapiens
gggtagagatgtggg

SEQ ID NO: 52503 - DNA, 15 bp, Homo sapiens
ggtagagatgtgggt

SEQ ID NO: 52504 - DNA, 15 bp, Homo sapiens
gtagagatgtgggtt

SEQ ID NO: 52505 - DNA, 15 bp, Homo sapiens
tagagatgtgggttc

SEQ ID NO: 52506 - DNA, 15 bp, Homo sapiens
agagatgtgggttcg

SEQ ID NO: 52507 - DNA, 15 bp, Homo sapiens
gagatgtgggttcgg

SEQ ID NO: 52508 - DNA, 15 bp, Homo sapiens
agatgtgggttcggc

SEQ ID NO: 52509 - DNA, 15 bp, Homo sapiens
gatgtgggttcggcc

SEQ ID NO: 52510 - DNA, 15 bp, Homo sapiens
atgtgggttcggcct

SEQ ID NO: 52511 - DNA, 15 bp, Homo sapiens
tgtgggttcggcctg

SEQ ID NO: 52512 - DNA, 15 bp, Homo sapiens
gtgggttcggcctgc

SEQ ID NO: 52513 - DNA, 15 bp, Homo sapiens
tgggttcggcctgcc

SEQ ID NO: 52514 - DNA, 15 bp, Homo sapiens
gggttcggcctgccc

SEQ ID NO: 52515 - DNA, 15 bp, Homo sapiens
ggttcggcctgcccg

SEQ ID NO: 52516 - DNA, 15 bp, Homo sapiens
gttcggcctgcccga

SEQ ID NO: 52517 - DNA, 15 bp, Homo sapiens
ttcggcctgcccgag

SEQ ID NO: 52518 - DNA, 15 bp, Homo sapiens
tcggcctgcccgaga

SEQ ID NO: 52519 - DNA, 15 bp, Homo sapiens
cggcctgcccgagag

SEQ ID NO: 52520 - DNA, 15 bp, Homo sapiens
ggcctgcccgagagt

SEQ ID NO: 52521 - DNA, 15 bp, Homo sapiens
gcctgcccgagagtg

SEQ ID NO: 52522 - DNA, 15 bp, Homo sapiens
cctgcccgagagtgt

SEQ ID NO: 52523 - DNA, 15 bp, Homo sapiens
ctgcccgagagtgtc

SEQ ID NO: 52524 - DNA, 15 bp, Homo sapiens
tgcccgagagtgtcg

SEQ ID NO: 52525 - DNA, 15 bp, Homo sapiens
gcccgagagtgtcgc

SEQ ID NO: 52526 - DNA, 15 bp, Homo sapiens
cccgagagtgtcgca

SEQ ID NO: 52527 - DNA, 15 bp, Homo sapiens
ccgagagtgtcgcag

SEQ ID NO: 52528 - DNA, 15 bp, Homo sapiens
cgagagtgtcgcaga

SEQ ID NO: 52529 - DNA, 15 bp, Homo sapiens
gagagtgtcgcagac

SEQ ID NO: 52530 - DNA, 15 bp, Homo sapiens
agagtgtcgcagacc

SEQ ID NO: 52531 - DNA, 15 bp, Homo sapiens
gagtgtcgcagaccc

SEQ ID NO: 52532 - DNA, 15 bp, Homo sapiens
agtgtcgcagaccct

SEQ ID NO: 52533 - DNA, 15 bp, Homo sapiens
gtgtcgcagaccctt

SEQ ID NO: 52534 - DNA, 15 bp, Homo sapiens
tgtcgcagacccttt

SEQ ID NO: 52535 - DNA, 15 bp, Homo sapiens
gtcgcagaccctttc

SEQ ID NO: 52536 - DNA, 15 bp, Homo sapiens
tcgcagaccctttca

SEQ ID NO: 52537 - DNA, 15 bp, Homo sapiens
cgcagaccctttcag

SEQ ID NO: 52538 - DNA, 15 bp, Homo sapiens
gcagaccctttcagt

SEQ ID NO: 52539 - DNA, 15 bp, Homo sapiens
cagaccctttcagtt

SEQ ID NO: 52540 - DNA, 15 bp, Homo sapiens
agaccctttcagttc

SEQ ID NO: 52541 - DNA, 15 bp, Homo sapiens
gaccctttcagttcc

SEQ ID NO: 52542 - DNA, 15 bp, Homo sapiens
accctttcagttccc

SEQ ID NO: 52543 - DNA, 15 bp, Homo sapiens
ccctttcagttccca

SEQ ID NO: 52544 - DNA, 15 bp, Homo sapiens
cctttcagttcccag

SEQ ID NO: 52545 - DNA, 15 bp, Homo sapiens
ctttcagttcccagc

SEQ ID NO: 52546 - DNA, 15 bp, Homo sapiens
tttcagttcccagcg

SEQ ID NO: 52547 - DNA, 15 bp, Homo sapiens
ttcagttcccagcgg

SEQ ID NO: 52548 - DNA, 15 bp, Homo sapiens
tcagttcccagcggt

SEQ ID NO: 52549 - DNA, 15 bp, Homo sapiens
cagttcccagcggta

SEQ ID NO: 52550 - DNA, 15 bp, Homo sapiens
agttcccagcggtag

SEQ ID NO: 52551 - DNA, 15 bp, Homo sapiens
gttcccagcggtagg

SEQ ID NO: 52552 - DNA, 15 bp, Homo sapiens
ttcccagcggtagga

SEQ ID NO: 52553 - DNA, 15 bp, Homo sapiens
tcccagcggtaggaa

SEQ ID NO: 52554 - DNA, 15 bp, Homo sapiens
cccagcggtaggaat

SEQ ID NO: 52555 - DNA, 15 bp, Homo sapiens
ccagcggtaggaatt

SEQ ID NO: 52556 - DNA, 15 bp, Homo sapiens
cagcggtaggaattc

SEQ ID NO: 52557 - DNA, 15 bp, Homo sapiens
agcggtaggaattcc

SEQ ID NO: 52558 - DNA, 15 bp, Homo sapiens
gcggtaggaattccg

SEQ ID NO: 52559 - DNA, 15 bp, Homo sapiens
cggtaggaattccgc

SEQ ID NO: 52560 - DNA, 15 bp, Homo sapiens
ggtaggaattccgcc

SEQ ID NO: 52561 - DNA, 15 bp, Homo sapiens
gtaggaattccgcct

SEQ ID NO: 52562 - DNA, 15 bp, Homo sapiens
taggaattccgcctc

SEQ ID NO: 52563 - DNA, 15 bp, Homo sapiens
aggaattccgcctcc

SEQ ID NO: 52564 - DNA, 15 bp, Homo sapiens
ggaattccgcctccc

SEQ ID NO: 52565 - DNA, 15 bp, Homo sapiens
gaattccgcctccca

SEQ ID NO: 52566 - DNA, 15 bp, Homo sapiens
aattccgcctcccaa

SEQ ID NO: 52567 - DNA, 15 bp, Homo sapiens
attccgcctcccaag

SEQ ID NO: 52568 - DNA, 15 bp, Homo sapiens
ttccgcctcccaagt

SEQ ID NO: 52569 - DNA, 15 bp, Homo sapiens
tccgcctcccaagtt

SEQ ID NO: 52570 - DNA, 15 bp, Homo sapiens
ccgcctcccaagttt

SEQ ID NO: 52571 - DNA, 15 bp, Homo sapiens
cgcctcccaagtttt

SEQ ID NO: 52572 - DNA, 15 bp, Homo sapiens
gcctcccaagttttc

SEQ ID NO: 52573 - DNA, 15 bp, Homo sapiens
cctcccaagttttcc

SEQ ID NO: 52574 - DNA, 15 bp, Homo sapiens
ctcccaagttttcca

SEQ ID NO: 52575 - DNA, 15 bp, Homo sapiens
tcccaagttttccaa

SEQ ID NO: 52576 - DNA, 15 bp, Homo sapiens
cccaagttttccaag

SEQ ID NO: 52577 - DNA, 15 bp, Homo sapiens
ccaagttttccaagc

SEQ ID NO: 52578 - DNA, 15 bp, Homo sapiens
caagttttccaagct

SEQ ID NO: 52579 - DNA, 15 bp, Homo sapiens
aagttttccaagcta

SEQ ID NO: 52580 - DNA, 15 bp, Homo sapiens
agttttccaagctac

SEQ ID NO: 52581 - DNA, 15 bp, Homo sapiens
gttttccaagctaca

SEQ ID NO: 52582 - DNA, 15 bp, Homo sapiens
ttttccaagctacat

SEQ ID NO: 52583 - DNA, 15 bp, Homo sapiens
tttccaagctacatt

SEQ ID NO: 52584 - DNA, 15 bp, Homo sapiens
ttccaagctacattg

SEQ ID NO: 52585 - DNA, 15 bp, Homo sapiens
tccaagctacattgg

SEQ ID NO: 52586 - DNA, 15 bp, Homo sapiens
ccaagctacattggc

SEQ ID NO: 52587 - DNA, 15 bp, Homo sapiens
caagctacattggct

SEQ ID NO: 52588 - DNA, 15 bp, Homo sapiens
aagctacattggctt

SEQ ID NO: 52589 - DNA, 15 bp, Homo sapiens
agctacattggcttc

SEQ ID NO: 52590 - DNA, 15 bp, Homo sapiens
gctacattggcttcg

SEQ ID NO: 52591 - DNA, 15 bp, Homo sapiens
ctacattggcttcgg

SEQ ID NO: 52592 - DNA, 15 bp, Homo sapiens
tacattggcttcgga

SEQ ID NO: 52593 - DNA, 15 bp, Homo sapiens
acattggcttcggac

SEQ ID NO: 52594 - DNA, 15 bp, Homo sapiens
cattggcttcggact

SEQ ID NO: 52595 - DNA, 15 bp, Homo sapiens
attggcttcggactt

SEQ ID NO: 52596 - DNA, 15 bp, Homo sapiens
ttggcttcggacttg

SEQ ID NO: 52597 - DNA, 15 bp, Homo sapiens
tggcttcggacttgt

SEQ ID NO: 52598 - DNA, 15 bp, Homo sapiens
ggcttcggacttgta

SEQ ID NO: 52599 - DNA, 15 bp, Homo sapiens
gcttcggacttgtaa

SEQ ID NO: 52600 - DNA, 15 bp, Homo sapiens
cttcggacttgtaag

SEQ ID NO: 52601 - DNA, 15 bp, Homo sapiens
ttcggacttgtaagt

SEQ ID NO: 52602 - DNA, 15 bp, Homo sapiens
tcggacttgtaagtc

SEQ ID NO: 52603 - DNA, 15 bp, Homo sapiens
cggacttgtaagtcc

SEQ ID NO: 52604 - DNA, 15 bp, Homo sapiens
ggacttgtaagtcca

SEQ ID NO: 52605 - DNA, 15 bp, Homo sapiens
gacttgtaagtccac

SEQ ID NO: 52606 - DNA, 15 bp, Homo sapiens
acttgtaagtccact

SEQ ID NO: 52607 - DNA, 15 bp, Homo sapiens
cttgtaagtccactt

SEQ ID NO: 52608 - DNA, 15 bp, Homo sapiens
ttgtaagtccacttc

SEQ ID NO: 52609 - DNA, 15 bp, Homo sapiens
tgtaagtccacttca

SEQ ID NO: 52610 - DNA, 15 bp, Homo sapiens
gtaagtccacttcag

SEQ ID NO: 52611 - DNA, 15 bp, Homo sapiens
taagtccacttcagt

SEQ ID NO: 52612 - DNA, 15 bp, Homo sapiens
aagtccacttcagtc

SEQ ID NO: 52613 - DNA, 15 bp, Homo sapiens
agtccacttcagtct

SEQ ID NO: 52614 - DNA, 15 bp, Homo sapiens
gtccacttcagtctc

SEQ ID NO: 52615 - DNA, 15 bp, Homo sapiens
tccacttcagtctca

SEQ ID NO: 52616 - DNA, 15 bp, Homo sapiens
ccacttcagtctcaa

SEQ ID NO: 52617 - DNA, 15 bp, Homo sapiens
cacttcagtctcaat

SEQ ID NO: 52618 - DNA, 15 bp, Homo sapiens
acttcagtctcaatt

SEQ ID NO: 52619 - DNA, 15 bp, Homo sapiens
cttcagtctcaattc

SEQ ID NO: 52620 - DNA, 15 bp, Homo sapiens
ttcagtctcaattcc

SEQ ID NO: 52621 - DNA, 15 bp, Homo sapiens
tcagtctcaattcct

SEQ ID NO: 52622 - DNA, 15 bp, Homo sapiens
cagtctcaattcctg

SEQ ID NO: 52623 - DNA, 15 bp, Homo sapiens
agtctcaattcctgg

SEQ ID NO: 52624 - DNA, 15 bp, Homo sapiens
gtctcaattcctggg

SEQ ID NO: 52625 - DNA, 15 bp, Homo sapiens
tctcaattcctgggg

SEQ ID NO: 52626 - DNA, 15 bp, Homo sapiens
ctcaattcctgggga

SEQ ID NO: 52627 - DNA, 15 bp, Homo sapiens
tcaattcctggggag

SEQ ID NO: 52628 - DNA, 15 bp, Homo sapiens
caattcctggggagc

SEQ ID NO: 52629 - DNA, 15 bp, Homo sapiens
aattcctggggagca

SEQ ID NO: 52630 - DNA, 15 bp, Homo sapiens
attcctggggagcag

SEQ ID NO: 52631 - DNA, 15 bp, Homo sapiens
ttcctggggagcagg

SEQ ID NO: 52632 - DNA, 15 bp, Homo sapiens
tcctggggagcaggt

SEQ ID NO: 52633 - DNA, 15 bp, Homo sapiens
cctggggagcaggta

SEQ ID NO: 52634 - DNA, 15 bp, Homo sapiens
ctggggagcaggtag

SEQ ID NO: 52635 - DNA, 15 bp, Homo sapiens
tggggagcaggtagc

SEQ ID NO: 52636 - DNA, 15 bp, Homo sapiens
ggggagcaggtagcc

SEQ ID NO: 52637 - DNA, 15 bp, Homo sapiens
gggagcaggtagccg

SEQ ID NO: 52638 - DNA, 15 bp, Homo sapiens
ggagcaggtagccgt

SEQ ID NO: 52639 - DNA, 15 bp, Homo sapiens
gagcaggtagccgtg

SEQ ID NO: 52640 - DNA, 15 bp, Homo sapiens
agcaggtagccgtgt

SEQ ID NO: 52641 - DNA, 15 bp, Homo sapiens
gcaggtagccgtgtg

SEQ ID NO: 52642 - DNA, 15 bp, Homo sapiens
caggtagccgtgtgc

SEQ ID NO: 52643 - DNA, 15 bp, Homo sapiens
aggtagccgtgtgca

SEQ ID NO: 52644 - DNA, 15 bp, Homo sapiens
ggtagccgtgtgcag

SEQ ID NO: 52645 - DNA, 15 bp, Homo sapiens
gtagccgtgtgcagc

SEQ ID NO: 52646 - DNA, 15 bp, Homo sapiens
tagccgtgtgcagct

SEQ ID NO: 52647 - DNA, 15 bp, Homo sapiens
agccgtgtgcagctc

SEQ ID NO: 52648 - DNA, 15 bp, Homo sapiens
gccgtgtgcagctcc

SEQ ID NO: 52649 - DNA, 15 bp, Homo sapiens
ccgtgtgcagctccg

SEQ ID NO: 52650 - DNA, 15 bp, Homo sapiens
cgtgtgcagctccgg

SEQ ID NO: 52651 - DNA, 15 bp, Homo sapiens
gtgtgcagctccggg

SEQ ID NO: 52652 - DNA, 15 bp, Homo sapiens
tgtgcagctccgggg

SEQ ID NO: 52653 - DNA, 15 bp, Homo sapiens
gtgcagctccgggga

SEQ ID NO: 52654 - DNA, 15 bp, Homo sapiens
tgcagctccggggaa

SEQ ID NO: 52655 - DNA, 15 bp, Homo sapiens
gcagctccggggaag

SEQ ID NO: 52656 - DNA, 15 bp, Homo sapiens
cagctccggggaagg

SEQ ID NO: 52657 - DNA, 15 bp, Homo sapiens
agctccggggaaggg

SEQ ID NO: 52658 - DNA, 15 bp, Homo sapiens
gctccggggaaggga

SEQ ID NO: 52659 - DNA, 15 bp, Homo sapiens
ctccggggaagggat

SEQ ID NO: 52660 - DNA, 15 bp, Homo sapiens
tccggggaagggatg

SEQ ID NO: 52661 - DNA, 15 bp, Homo sapiens
ccggggaagggatgc

SEQ ID NO: 52662 - DNA, 15 bp, Homo sapiens
cggggaagggatgcg

SEQ ID NO: 52663 - DNA, 15 bp, Homo sapiens
ggggaagggatgcgg

SEQ ID NO: 52664 - DNA, 15 bp, Homo sapiens
gggaagggatgcggg

SEQ ID NO: 52665 - DNA, 15 bp, Homo sapiens
ggaagggatgcgggc

SEQ ID NO: 52666 - DNA, 15 bp, Homo sapiens
gaagggatgcgggct

SEQ ID NO: 52667 - DNA, 15 bp, Homo sapiens
aagggatgcgggctg

SEQ ID NO: 52668 - DNA, 15 bp, Homo sapiens
agggatgcgggctga

SEQ ID NO: 52669 - DNA, 15 bp, Homo sapiens
gggatgcgggctgaa

SEQ ID NO: 52670 - DNA, 15 bp, Homo sapiens
ggatgcgggctgaag

SEQ ID NO: 52671 - DNA, 15 bp, Homo sapiens
gatgcgggctgaagg

SEQ ID NO: 52672 - DNA, 15 bp, Homo sapiens
atgcgggctgaaggc

SEQ ID NO: 52673 - DNA, 15 bp, Homo sapiens
tgcgggctgaaggcg

SEQ ID NO: 52674 - DNA, 15 bp, Homo sapiens
gcgggctgaaggcgc

SEQ ID NO: 52675 - DNA, 15 bp, Homo sapiens
cgggctgaaggcgca

SEQ ID NO: 52676 - DNA, 15 bp, Homo sapiens
gggctgaaggcgcaa

SEQ ID NO: 52677 - DNA, 15 bp, Homo sapiens
ggctgaaggcgcaag

SEQ ID NO: 52678 - DNA, 15 bp, Homo sapiens
gctgaaggcgcaagc

SEQ ID NO: 52679 - DNA, 15 bp, Homo sapiens
ctgaaggcgcaagct

SEQ ID NO: 52680 - DNA, 15 bp, Homo sapiens
tgaaggcgcaagctt

SEQ ID NO: 52681 - DNA, 15 bp, Homo sapiens
gaaggcgcaagcttc

SEQ ID NO: 52682 - DNA, 15 bp, Homo sapiens
aaggcgcaagcttcc

SEQ ID NO: 52683 - DNA, 15 bp, Homo sapiens
aggcgcaagcttccc

SEQ ID NO: 52684 - DNA, 15 bp, Homo sapiens
ggcgcaagcttccct

SEQ ID NO: 52685 - DNA, 15 bp, Homo sapiens
gcgcaagcttccctc

SEQ ID NO: 52686 - DNA, 15 bp, Homo sapiens
cgcaagcttccctcc

SEQ ID NO: 52687 - DNA, 15 bp, Homo sapiens
gcaagcttccctccc

SEQ ID NO: 52688 - DNA, 15 bp, Homo sapiens
caagcttccctccca

SEQ ID NO: 52689 - DNA, 15 bp, Homo sapiens
aagcttccctcccac

SEQ ID NO: 52690 - DNA, 15 bp, Homo sapiens
agcttccctcccact

SEQ ID NO: 52691 - DNA, 15 bp, Homo sapiens
gcttccctcccactc

SEQ ID NO: 52692 - DNA, 15 bp, Homo sapiens
cttccctcccactcc

SEQ ID NO: 52693 - DNA, 15 bp, Homo sapiens
ttccctcccactccc

SEQ ID NO: 52694 - DNA, 15 bp, Homo sapiens
tccctcccactcccc

SEQ ID NO: 52695 - DNA, 15 bp, Homo sapiens
ccctcccactccccc

SEQ ID NO: 52696 - DNA, 15 bp, Homo sapiens
cctcccactcccccc

SEQ ID NO: 52697 - DNA, 15 bp, Homo sapiens
ctcccactccccccg

SEQ ID NO: 52698 - DNA, 15 bp, Homo sapiens
tcccactccccccgc

SEQ ID NO: 52699 - DNA, 15 bp, Homo sapiens
cccactccccccgca

SEQ ID NO: 52700 - DNA, 15 bp, Homo sapiens
ccactccccccgcaa

SEQ ID NO: 52701 - DNA, 15 bp, Homo sapiens
cactccccccgcaag

SEQ ID NO: 52702 - DNA, 15 bp, Homo sapiens
actccccccgcaagt

SEQ ID NO: 52703 - DNA, 15 bp, Homo sapiens
ctccccccgcaagtc

SEQ ID NO: 52704 - DNA, 15 bp, Homo sapiens
tccccccgcaagtcg

SEQ ID NO: 52705 - DNA, 15 bp, Homo sapiens
ccccccgcaagtcgg

SEQ ID NO: 52706 - DNA, 15 bp, Homo sapiens
cccccgcaagtcggc

SEQ ID NO: 52707 - DNA, 15 bp, Homo sapiens
ccccgcaagtcggcg

SEQ ID NO: 52708 - DNA, 15 bp, Homo sapiens
cccgcaagtcggcgc

SEQ ID NO: 52709 - DNA, 15 bp, Homo sapiens
ccgcaagtcggcgcg

SEQ ID NO: 52710 - DNA, 15 bp, Homo sapiens
cgcaagtcggcgcgg

SEQ ID NO: 52711 - DNA, 15 bp, Homo sapiens
gcaagtcggcgcggg

SEQ ID NO: 52712 - DNA, 15 bp, Homo sapiens
caagtcggcgcgggg

SEQ ID NO: 52713 - DNA, 15 bp, Homo sapiens
aagtcggcgcgggga

SEQ ID NO: 52714 - DNA, 15 bp, Homo sapiens
agtcggcgcggggac

SEQ ID NO: 52715 - DNA, 15 bp, Homo sapiens
gtcggcgcggggacc

SEQ ID NO: 52716 - DNA, 15 bp, Homo sapiens
tcggcgcggggacca

SEQ ID NO: 52717 - DNA, 15 bp, Homo sapiens
cggcgcggggaccac

SEQ ID NO: 52718 - DNA, 15 bp, Homo sapiens
ggcgcggggaccacc

SEQ ID NO: 52719 - DNA, 15 bp, Homo sapiens
gcgcggggaccaccc

SEQ ID NO: 52720 - DNA, 15 bp, Homo sapiens
cgcggggaccaccca

SEQ ID NO: 52721 - DNA, 15 bp, Homo sapiens
gcggggaccacccac

SEQ ID NO: 52722 - DNA, 15 bp, Homo sapiens
cggggaccacccacc

SEQ ID NO: 52723 - DNA, 15 bp, Homo sapiens
ggggaccacccaccc

SEQ ID NO: 52724 - DNA, 15 bp, Homo sapiens
gggaccacccacccc

SEQ ID NO: 52725 - DNA, 15 bp, Homo sapiens
ggaccacccaccccc

SEQ ID NO: 52726 - DNA, 15 bp, Homo sapiens
gaccacccaccccct

SEQ ID NO: 52727 - DNA, 15 bp, Homo sapiens
accacccaccccctg

SEQ ID NO: 52728 - DNA, 15 bp, Homo sapiens
ccacccaccccctgg

SEQ ID NO: 52729 - DNA, 15 bp, Homo sapiens
cacccaccccctgga

SEQ ID NO: 52730 - DNA, 15 bp, Homo sapiens
acccaccccctggaa

SEQ ID NO: 52731 - DNA, 15 bp, Homo sapiens
cccaccccctggaag

SEQ ID NO: 52732 - DNA, 15 bp, Homo sapiens
ccaccccctggaagg

SEQ ID NO: 52733 - DNA, 15 bp, Homo sapiens
caccccctggaagga

SEQ ID NO: 52734 - DNA, 15 bp, Homo sapiens
accccctggaaggat

SEQ ID NO: 52735 - DNA, 15 bp, Homo sapiens
ccccctggaaggatt

SEQ ID NO: 52736 - DNA, 15 bp, Homo sapiens
cccctggaaggattc

SEQ ID NO: 52737 - DNA, 15 bp, Homo sapiens
ccctggaaggattcc

SEQ ID NO: 52738 - DNA, 15 bp, Homo sapiens
cctggaaggattcct

SEQ ID NO: 52739 - DNA, 15 bp, Homo sapiens
ctggaaggattccta

SEQ ID NO: 52740 - DNA, 15 bp, Homo sapiens
tggaaggattcctag

SEQ ID NO: 52741 - DNA, 15 bp, Homo sapiens
ggaaggattcctagc

SEQ ID NO: 52742 - DNA, 15 bp, Homo sapiens
gaaggattcctagcc

SEQ ID NO: 52743 - DNA, 15 bp, Homo sapiens
aaggattcctagcct

SEQ ID NO: 52744 - DNA, 15 bp, Homo sapiens
aggattcctagccta

SEQ ID NO: 52745 - DNA, 15 bp, Homo sapiens
ggattcctagcctag

SEQ ID NO: 52746 - DNA, 15 bp, Homo sapiens
gattcctagcctagc

SEQ ID NO: 52747 - DNA, 15 bp, Homo sapiens
attcctagcctagcc

SEQ ID NO: 52748 - DNA, 15 bp, Homo sapiens
ttcctagcctagccc

SEQ ID NO: 52749 - DNA, 15 bp, Homo sapiens
tcctagcctagcccc

SEQ ID NO: 52750 - DNA, 15 bp, Homo sapiens
cctagcctagcccca

SEQ ID NO: 52751 - DNA, 15 bp, Homo sapiens
ctagcctagccccag

SEQ ID NO: 52752 - DNA, 15 bp, Homo sapiens
tagcctagccccagc

SEQ ID NO: 52753 - DNA, 15 bp, Homo sapiens
agcctagccccagca

SEQ ID NO: 52754 - DNA, 15 bp, Homo sapiens
gcctagccccagcac

SEQ ID NO: 52755 - DNA, 15 bp, Homo sapiens
cctagccccagcacc

SEQ ID NO: 52756 - DNA, 15 bp, Homo sapiens
ctagccccagcaccc

SEQ ID NO: 52757 - DNA, 15 bp, Homo sapiens
tagccccagcaccct

SEQ ID NO: 52758 - DNA, 15 bp, Homo sapiens
agccccagcaccctc

SEQ ID NO: 52759 - DNA, 15 bp, Homo sapiens
gccccagcaccctcc

SEQ ID NO: 52760 - DNA, 15 bp, Homo sapiens
ccccagcaccctccc

SEQ ID NO: 52761 - DNA, 15 bp, Homo sapiens
cccagcaccctcccc

SEQ ID NO: 52762 - DNA, 15 bp, Homo sapiens
ccagcaccctcccct

SEQ ID NO: 52763 - DNA, 15 bp, Homo sapiens
cagcaccctcccctc

SEQ ID NO: 52764 - DNA, 15 bp, Homo sapiens
agcaccctcccctca

SEQ ID NO: 52765 - DNA, 15 bp, Homo sapiens
gcaccctcccctcag

SEQ ID NO: 52766 - DNA, 15 bp, Homo sapiens
caccctcccctcagt

SEQ ID NO: 52767 - DNA, 15 bp, Homo sapiens
accctcccctcagtc

SEQ ID NO: 52768 - DNA, 15 bp, Homo sapiens
ccctcccctcagtca

SEQ ID NO: 52769 - DNA, 15 bp, Homo sapiens
cctcccctcagtcag

SEQ ID NO: 52770 - DNA, 15 bp, Homo sapiens
ctcccctcagtcagg

SEQ ID NO: 52771 - DNA, 15 bp, Homo sapiens
tcccctcagtcagga

SEQ ID NO: 52772 - DNA, 15 bp, Homo sapiens
cccctcagtcaggac

SEQ ID NO: 52773 - DNA, 15 bp, Homo sapiens
ccctcagtcaggacc

SEQ ID NO: 52774 - DNA, 15 bp, Homo sapiens
cctcagtcaggaccc

SEQ ID NO: 52775 - DNA, 15 bp, Homo sapiens
ctcagtcaggaccct

SEQ ID NO: 52776 - DNA, 15 bp, Homo sapiens
tcagtcaggaccctc

SEQ ID NO: 52777 - DNA, 15 bp, Homo sapiens
cagtcaggaccctcg

SEQ ID NO: 52778 - DNA, 15 bp, Homo sapiens
agtcaggaccctcga

SEQ ID NO: 52779 - DNA, 15 bp, Homo sapiens
gtcaggaccctcgac

SEQ ID NO: 52780 - DNA, 15 bp, Homo sapiens
tcaggaccctcgaca

SEQ ID NO: 52781 - DNA, 15 bp, Homo sapiens
caggaccctcgacag

SEQ ID NO: 52782 - DNA, 15 bp, Homo sapiens
aggaccctcgacagc

SEQ ID NO: 52783 - DNA, 15 bp, Homo sapiens
ggaccctcgacagct

SEQ ID NO: 52784 - DNA, 15 bp, Homo sapiens
gaccctcgacagctc

SEQ ID NO: 52785 - DNA, 15 bp, Homo sapiens
accctcgacagctct

SEQ ID NO: 52786 - DNA, 15 bp, Homo sapiens
ccctcgacagctctg

SEQ ID NO: 52787 - DNA, 15 bp, Homo sapiens
cctcgacagctctgg

SEQ ID NO: 52788 - DNA, 15 bp, Homo sapiens
ctcgacagctctggc

SEQ ID NO: 52789 - DNA, 15 bp, Homo sapiens
tcgacagctctggcc

SEQ ID NO: 52790 - DNA, 15 bp, Homo sapiens
cgacagctctggccc

SEQ ID NO: 52791 - DNA, 15 bp, Homo sapiens
gacagctctggcccc

SEQ ID NO: 52792 - DNA, 15 bp, Homo sapiens
acagctctggccccc

SEQ ID NO: 52793 - DNA, 15 bp, Homo sapiens
cagctctggccccct

SEQ ID NO: 52794 - DNA, 15 bp, Homo sapiens
agctctggcccccta

SEQ ID NO: 52795 - DNA, 15 bp, Homo sapiens
gctctggccccctaa

SEQ ID NO: 52796 - DNA, 15 bp, Homo sapiens
ctctggccccctaag

SEQ ID NO: 52797 - DNA, 15 bp, Homo sapiens
tctggccccctaagt

SEQ ID NO: 52798 - DNA, 15 bp, Homo sapiens
ctggccccctaagtc

SEQ ID NO: 52799 - DNA, 15 bp, Homo sapiens
tggccccctaagtct

SEQ ID NO: 52800 - DNA, 15 bp, Homo sapiens
ggccccctaagtctc

SEQ ID NO: 52801 - DNA, 15 bp, Homo sapiens
gccccctaagtctct

SEQ ID NO: 52802 - DNA, 15 bp, Homo sapiens
ccccctaagtctctc

SEQ ID NO: 52803 - DNA, 15 bp, Homo sapiens
cccctaagtctctct

SEQ ID NO: 52804 - DNA, 15 bp, Homo sapiens
ccctaagtctctctc

SEQ ID NO: 52805 - DNA, 15 bp, Homo sapiens
cctaagtctctctcg

SEQ ID NO: 52806 - DNA, 15 bp, Homo sapiens
ctaagtctctctcga

SEQ ID NO: 52807 - DNA, 15 bp, Homo sapiens
taagtctctctcgac

SEQ ID NO: 52808 - DNA, 15 bp, Homo sapiens
aagtctctctcgact

SEQ ID NO: 52809 - DNA, 15 bp, Homo sapiens
agtctctctcgacta

SEQ ID NO: 52810 - DNA, 15 bp, Homo sapiens
gtctctctcgactac

SEQ ID NO: 52811 - DNA, 15 bp, Homo sapiens
tctctctcgactact

SEQ ID NO: 52812 - DNA, 15 bp, Homo sapiens
ctctctcgactactc

SEQ ID NO: 52813 - DNA, 15 bp, Homo sapiens
tctctcgactactcc

SEQ ID NO: 52814 - DNA, 15 bp, Homo sapiens
ctctcgactactcct

SEQ ID NO: 52815 - DNA, 15 bp, Homo sapiens
tctcgactactcctg

SEQ ID NO: 52816 - DNA, 15 bp, Homo sapiens
ctcgactactcctgg

SEQ ID NO: 52817 - DNA, 15 bp, Homo sapiens
tcgactactcctggg

SEQ ID NO: 52818 - DNA, 15 bp, Homo sapiens
cgactactcctgggc

SEQ ID NO: 52819 - DNA, 15 bp, Homo sapiens
gactactcctgggct

SEQ ID NO: 52820 - DNA, 15 bp, Homo sapiens
actactcctgggctg

SEQ ID NO: 52821 - DNA, 15 bp, Homo sapiens
ctactcctgggctgg

SEQ ID NO: 52822 - DNA, 15 bp, Homo sapiens
tactcctgggctggg

SEQ ID NO: 52823 - DNA, 15 bp, Homo sapiens
actcctgggctgggg

SEQ ID NO: 52824 - DNA, 15 bp, Homo sapiens
ctcctgggctggggg

SEQ ID NO: 52825 - DNA, 15 bp, Homo sapiens
tcctgggctggggga

SEQ ID NO: 52826 - DNA, 15 bp, Homo sapiens
cctgggctgggggag

SEQ ID NO: 52827 - DNA, 15 bp, Homo sapiens
ctgggctgggggagg

SEQ ID NO: 52828 - DNA, 15 bp, Homo sapiens
tgggctgggggaggg

SEQ ID NO: 52829 - DNA, 15 bp, Homo sapiens
gggctgggggagggc

SEQ ID NO: 52830 - DNA, 15 bp, Homo sapiens
ggctgggggagggct

SEQ ID NO: 52831 - DNA, 15 bp, Homo sapiens
gctgggggagggctg

SEQ ID NO: 52832 - DNA, 15 bp, Homo sapiens
ctgggggagggctgc

SEQ ID NO: 52833 - DNA, 15 bp, Homo sapiens
tgggggagggctgcg

SEQ ID NO: 52834 - DNA, 15 bp, Homo sapiens
gggggagggctgcga

SEQ ID NO: 52835 - DNA, 15 bp, Homo sapiens
ggggagggctgcgag

SEQ ID NO: 52836 - DNA, 15 bp, Homo sapiens
gggagggctgcgagg

SEQ ID NO: 52837 - DNA, 15 bp, Homo sapiens
ggagggctgcgaggg

SEQ ID NO: 52838 - DNA, 15 bp, Homo sapiens
gagggctgcgaggga

SEQ ID NO: 52839 - DNA, 15 bp, Homo sapiens
agggctgcgagggat

SEQ ID NO: 52840 - DNA, 15 bp, Homo sapiens
gggctgcgagggatc

SEQ ID NO: 52841 - DNA, 15 bp, Homo sapiens
ggctgcgagggatcc

SEQ ID NO: 52842 - DNA, 15 bp, Homo sapiens
gctgcgagggatccc

SEQ ID NO: 52843 - DNA, 15 bp, Homo sapiens
ctgcgagggatcccc

SEQ ID NO: 52844 - DNA, 15 bp, Homo sapiens
tgcgagggatccccg

SEQ ID NO: 52845 - DNA, 15 bp, Homo sapiens
gcgagggatccccgg

SEQ ID NO: 52846 - DNA, 15 bp, Homo sapiens
cgagggatccccggg

SEQ ID NO: 52847 - DNA, 15 bp, Homo sapiens
gagggatccccgggt

SEQ ID NO: 52848 - DNA, 15 bp, Homo sapiens
agggatccccgggtc

SEQ ID NO: 52849 - DNA, 15 bp, Homo sapiens
gggatccccgggtcg

SEQ ID NO: 52850 - DNA, 15 bp, Homo sapiens
ggatccccgggtcgc

SEQ ID NO: 52851 - DNA, 15 bp, Homo sapiens
gatccccgggtcgcc

SEQ ID NO: 52852 - DNA, 15 bp, Homo sapiens
atccccgggtcgccg

SEQ ID NO: 52853 - DNA, 15 bp, Homo sapiens
tccccgggtcgccgt

SEQ ID NO: 52854 - DNA, 15 bp, Homo sapiens
ccccgggtcgccgtc

SEQ ID NO: 52855 - DNA, 15 bp, Homo sapiens
cccgggtcgccgtct

SEQ ID NO: 52856 - DNA, 15 bp, Homo sapiens
ccgggtcgccgtctt

SEQ ID NO: 52857 - DNA, 15 bp, Homo sapiens
cgggtcgccgtcttt

SEQ ID NO: 52858 - DNA, 15 bp, Homo sapiens
gggtcgccgtctttg

SEQ ID NO: 52859 - DNA, 15 bp, Homo sapiens
ggtcgccgtctttgc

SEQ ID NO: 52860 - DNA, 15 bp, Homo sapiens
gtcgccgtctttgct

SEQ ID NO: 52861 - DNA, 15 bp, Homo sapiens
tcgccgtctttgctc

SEQ ID NO: 52862 - DNA, 15 bp, Homo sapiens
cgccgtctttgctcc

SEQ ID NO: 52863 - DNA, 15 bp, Homo sapiens
gccgtctttgctccc

SEQ ID NO: 52864 - DNA, 15 bp, Homo sapiens
ccgtctttgctccca

SEQ ID NO: 52865 - DNA, 15 bp, Homo sapiens
cgtctttgctcccat

SEQ ID NO: 52866 - DNA, 15 bp, Homo sapiens
gtctttgctcccatc

SEQ ID NO: 52867 - DNA, 15 bp, Homo sapiens
tctttgctcccatca

SEQ ID NO: 52868 - DNA, 15 bp, Homo sapiens
ctttgctcccatcac

SEQ ID NO: 52869 - DNA, 15 bp, Homo sapiens
tttgctcccatcacg

SEQ ID NO: 52870 - DNA, 15 bp, Homo sapiens
ttgctcccatcacgc

SEQ ID NO: 52871 - DNA, 15 bp, Homo sapiens
tgctcccatcacgca

SEQ ID NO: 52872 - DNA, 15 bp, Homo sapiens
gctcccatcacgcag

SEQ ID NO: 52873 - DNA, 15 bp, Homo sapiens
ctcccatcacgcagc

SEQ ID NO: 52874 - DNA, 15 bp, Homo sapiens
tcccatcacgcagct

SEQ ID NO: 52875 - DNA, 15 bp, Homo sapiens
cccatcacgcagctc

SEQ ID NO: 52876 - DNA, 15 bp, Homo sapiens
ccatcacgcagctct

SEQ ID NO: 52877 - DNA, 15 bp, Homo sapiens
catcacgcagctctg

SEQ ID NO: 52878 - DNA, 15 bp, Homo sapiens
atcacgcagctctgg

SEQ ID NO: 52879 - DNA, 15 bp, Homo sapiens
tcacgcagctctggg

SEQ ID NO: 52880 - DNA, 15 bp, Homo sapiens
cacgcagctctgggt

SEQ ID NO: 52881 - DNA, 15 bp, Homo sapiens
acgcagctctgggtc

SEQ ID NO: 52882 - DNA, 15 bp, Homo sapiens
cgcagctctgggtct

SEQ ID NO: 52883 - DNA, 15 bp, Homo sapiens
gcagctctgggtctc

SEQ ID NO: 52884 - DNA, 15 bp, Homo sapiens
cagctctgggtctcc

SEQ ID NO: 52885 - DNA, 15 bp, Homo sapiens
agctctgggtctcct

SEQ ID NO: 52886 - DNA, 15 bp, Homo sapiens
gctctgggtctcctc

SEQ ID NO: 52887 - DNA, 15 bp, Homo sapiens
ctctgggtctcctcc

SEQ ID NO: 52888 - DNA, 15 bp, Homo sapiens
tctgggtctcctcca

SEQ ID NO: 52889 - DNA, 15 bp, Homo sapiens
ctgggtctcctccag

SEQ ID NO: 52890 - DNA, 15 bp, Homo sapiens
tgggtctcctccagg

SEQ ID NO: 52891 - DNA, 15 bp, Homo sapiens
gggtctcctccaggc

SEQ ID NO: 52892 - DNA, 15 bp, Homo sapiens
ggtctcctccaggcc

SEQ ID NO: 52893 - DNA, 15 bp, Homo sapiens
gtctcctccaggcct

SEQ ID NO: 52894 - DNA, 15 bp, Homo sapiens
tctcctccaggcctt

SEQ ID NO: 52895 - DNA, 15 bp, Homo sapiens
ctcctccaggccttc

SEQ ID NO: 52896 - DNA, 15 bp, Homo sapiens
tcctccaggccttcc

SEQ ID NO: 52897 - DNA, 15 bp, Homo sapiens
cctccaggccttccc

SEQ ID NO: 52898 - DNA, 15 bp, Homo sapiens
ctccaggccttccct

SEQ ID NO: 52899 - DNA, 15 bp, Homo sapiens
tccaggccttccctc

SEQ ID NO: 52900 - DNA, 15 bp, Homo sapiens
ccaggccttccctcc

SEQ ID NO: 52901 - DNA, 15 bp, Homo sapiens
caggccttccctcct

SEQ ID NO: 52902 - DNA, 15 bp, Homo sapiens
aggccttccctcctc

SEQ ID NO: 52903 - DNA, 15 bp, Homo sapiens
ggccttccctcctct

SEQ ID NO: 52904 - DNA, 15 bp, Homo sapiens
gccttccctcctcta

SEQ ID NO: 52905 - DNA, 15 bp, Homo sapiens
ccttccctcctctac

SEQ ID NO: 52906 - DNA, 15 bp, Homo sapiens
cttccctcctctact

SEQ ID NO: 52907 - DNA, 15 bp, Homo sapiens
ttccctcctctactt

SEQ ID NO: 52908 - DNA, 15 bp, Homo sapiens
tccctcctctacttc

SEQ ID NO: 52909 - DNA, 15 bp, Homo sapiens
ccctcctctacttcg

SEQ ID NO: 52910 - DNA, 15 bp, Homo sapiens
cctcctctacttcgt

SEQ ID NO: 52911 - DNA, 15 bp, Homo sapiens
ctcctctacttcgtg

SEQ ID NO: 52912 - DNA, 15 bp, Homo sapiens
tcctctacttcgtga

SEQ ID NO: 52913 - DNA, 15 bp, Homo sapiens
cctctacttcgtgac

SEQ ID NO: 52914 - DNA, 15 bp, Homo sapiens
ctctacttcgtgact

SEQ ID NO: 52915 - DNA, 15 bp, Homo sapiens
tctacttcgtgactt

SEQ ID NO: 52916 - DNA, 15 bp, Homo sapiens
ctacttcgtgacttc

SEQ ID NO: 52917 - DNA, 15 bp, Homo sapiens
tacttcgtgacttcc

SEQ ID NO: 52918 - DNA, 15 bp, Homo sapiens
acttcgtgacttccc

SEQ ID NO: 52919 - DNA, 15 bp, Homo sapiens
cttcgtgacttcccc

SEQ ID NO: 52920 - DNA, 15 bp, Homo sapiens
ttcgtgacttccccg

SEQ ID NO: 52921 - DNA, 15 bp, Homo sapiens
tcgtgacttccccgg

SEQ ID NO: 52922 - DNA, 15 bp, Homo sapiens
cgtgacttccccggg

SEQ ID NO: 52923 - DNA, 15 bp, Homo sapiens
gtgacttccccgggt

SEQ ID NO: 52924 - DNA, 15 bp, Homo sapiens
tgacttccccgggtc

SEQ ID NO: 52925 - DNA, 15 bp, Homo sapiens
gacttccccgggtcc

SEQ ID NO: 52926 - DNA, 15 bp, Homo sapiens
acttccccgggtccc

SEQ ID NO: 52927 - DNA, 15 bp, Homo sapiens
cttccccgggtccct

SEQ ID NO: 52928 - DNA, 15 bp, Homo sapiens
ttccccgggtccctt

SEQ ID NO: 52929 - DNA, 15 bp, Homo sapiens
tccccgggtcccttt

SEQ ID NO: 52930 - DNA, 15 bp, Homo sapiens
ccccgggtccctttt

SEQ ID NO: 52931 - DNA, 15 bp, Homo sapiens
cccgggtcccttttt

SEQ ID NO: 52932 - DNA, 15 bp, Homo sapiens
ccgggtccctttttc

SEQ ID NO: 52933 - DNA, 15 bp, Homo sapiens
cgggtccctttttcc

SEQ ID NO: 52934 - DNA, 15 bp, Homo sapiens
gggtccctttttccc

SEQ ID NO: 52935 - DNA, 15 bp, Homo sapiens
ggtccctttttccct

SEQ ID NO: 52936 - DNA, 15 bp, Homo sapiens
gtccctttttccctg

SEQ ID NO: 52937 - DNA, 15 bp, Homo sapiens
tccctttttccctgg

SEQ ID NO: 52938 - DNA, 15 bp, Homo sapiens
ccctttttccctggt

SEQ ID NO: 52939 - DNA, 15 bp, Homo sapiens
cctttttccctggtg

SEQ ID NO: 52940 - DNA, 15 bp, Homo sapiens
ctttttccctggtgg

SEQ ID NO: 52941 - DNA, 15 bp, Homo sapiens
tttttccctggtggt

SEQ ID NO: 52942 - DNA, 15 bp, Homo sapiens
ttttccctggtggtg

SEQ ID NO: 52943 - DNA, 15 bp, Homo sapiens
tttccctggtggtgc

SEQ ID NO: 52944 - DNA, 15 bp, Homo sapiens
ttccctggtggtgcc

SEQ ID NO: 52945 - DNA, 15 bp, Homo sapiens
tccctggtggtgccg

SEQ ID NO: 52946 - DNA, 15 bp, Homo sapiens
ccctggtggtgccgg

SEQ ID NO: 52947 - DNA, 15 bp, Homo sapiens
cctggtggtgccggc

SEQ ID NO: 52948 - DNA, 15 bp, Homo sapiens
ctggtggtgccggct

SEQ ID NO: 52949 - DNA, 15 bp, Homo sapiens
tggtggtgccggctg

SEQ ID NO: 52950 - DNA, 15 bp, Homo sapiens
ggtggtgccggctga

SEQ ID NO: 52951 - DNA, 15 bp, Homo sapiens
gtggtgccggctgac

SEQ ID NO: 52952 - DNA, 15 bp, Homo sapiens
tggtgccggctgacc

SEQ ID NO: 52953 - DNA, 15 bp, Homo sapiens
ggtgccggctgacct

SEQ ID NO: 52954 - DNA, 15 bp, Homo sapiens
gtgccggctgacctt

SEQ ID NO: 52955 - DNA, 15 bp, Homo sapiens
tgccggctgaccttc

SEQ ID NO: 52956 - DNA, 15 bp, Homo sapiens
gccggctgaccttct

SEQ ID NO: 52957 - DNA, 15 bp, Homo sapiens
ccggctgaccttctg

SEQ ID NO: 52958 - DNA, 15 bp, Homo sapiens
cggctgaccttctgg

SEQ ID NO: 52959 - DNA, 15 bp, Homo sapiens
ggctgaccttctggg

SEQ ID NO: 52960 - DNA, 15 bp, Homo sapiens
gctgaccttctgggt

SEQ ID NO: 52961 - DNA, 15 bp, Homo sapiens
ctgaccttctgggtt

SEQ ID NO: 52962 - DNA, 15 bp, Homo sapiens
tgaccttctgggttg

SEQ ID NO: 52963 - DNA, 15 bp, Homo sapiens
gaccttctgggttgt

SEQ ID NO: 52964 - DNA, 15 bp, Homo sapiens
accttctgggttgtg

SEQ ID NO: 52965 - DNA, 15 bp, Homo sapiens
ccttctgggttgtgg

SEQ ID NO: 52966 - DNA, 15 bp, Homo sapiens
cttctgggttgtggg

SEQ ID NO: 52967 - DNA, 15 bp, Homo sapiens
ttctgggttgtggga

SEQ ID NO: 52968 - DNA, 15 bp, Homo sapiens
tctgggttgtgggat

SEQ ID NO: 52969 - DNA, 15 bp, Homo sapiens
ctgggttgtgggatg

SEQ ID NO: 52970 - DNA, 15 bp, Homo sapiens
tgggttgtgggatgg

SEQ ID NO: 52971 - DNA, 15 bp, Homo sapiens
gggttgtgggatggg

SEQ ID NO: 52972 - DNA, 15 bp, Homo sapiens
ggttgtgggatgggg

SEQ ID NO: 52973 - DNA, 15 bp, Homo sapiens
gttgtgggatggggg

SEQ ID NO: 52974 - DNA, 15 bp, Homo sapiens
ttgtgggatggggga

SEQ ID NO: 52975 - DNA, 15 bp, Homo sapiens
tgtgggatgggggag

SEQ ID NO: 52976 - DNA, 15 bp, Homo sapiens
gtgggatgggggaga

SEQ ID NO: 52977 - DNA, 15 bp, Homo sapiens
tgggatgggggagaa

SEQ ID NO: 52978 - DNA, 15 bp, Homo sapiens
gggatgggggagaaa

SEQ ID NO: 52979 - DNA, 15 bp, Homo sapiens
ggatgggggagaaaa

SEQ ID NO: 52980 - DNA, 15 bp, Homo sapiens
gatgggggagaaaac

SEQ ID NO: 52981 - DNA, 15 bp, Homo sapiens
atgggggagaaaact

SEQ ID NO: 52982 - DNA, 15 bp, Homo sapiens
tgggggagaaaactc

SEQ ID NO: 52983 - DNA, 15 bp, Homo sapiens
gggggagaaaactcc

SEQ ID NO: 52984 - DNA, 15 bp, Homo sapiens
ggggagaaaactccc

SEQ ID NO: 52985 - DNA, 15 bp, Homo sapiens
gggagaaaactcccc

SEQ ID NO: 52986 - DNA, 15 bp, Homo sapiens
ggagaaaactcccca

SEQ ID NO: 52987 - DNA, 15 bp, Homo sapiens
gagaaaactccccaa

SEQ ID NO: 52988 - DNA, 15 bp, Homo sapiens
agaaaactccccaag

SEQ ID NO: 52989 - DNA, 15 bp, Homo sapiens
gaaaactccccaaga

SEQ ID NO: 52990 - DNA, 15 bp, Homo sapiens
aaaactccccaagag

SEQ ID NO: 52991 - DNA, 15 bp, Homo sapiens
aaactccccaagagt

SEQ ID NO: 52992 - DNA, 15 bp, Homo sapiens
aactccccaagagta

SEQ ID NO: 52993 - DNA, 15 bp, Homo sapiens
actccccaagagtaa

SEQ ID NO: 52994 - DNA, 15 bp, Homo sapiens
ctccccaagagtaac

SEQ ID NO: 52995 - DNA, 15 bp, Homo sapiens
tccccaagagtaact

SEQ ID NO: 52996 - DNA, 15 bp, Homo sapiens
ccccaagagtaactc

SEQ ID NO: 52997 - DNA, 15 bp, Homo sapiens
cccaagagtaactcc

SEQ ID NO: 52998 - DNA, 15 bp, Homo sapiens
ccaagagtaactcca

SEQ ID NO: 52999 - DNA, 15 bp, Homo sapiens
caagagtaactccaa

SEQ ID NO: 53000 - DNA, 15 bp, Homo sapiens
aagagtaactccaaa

SEQ ID NO: 53001 - DNA, 15 bp, Homo sapiens
agagtaactccaaat

SEQ ID NO: 53002 - DNA, 15 bp, Homo sapiens
gagtaactccaaatc

SEQ ID NO: 53003 - DNA, 15 bp, Homo sapiens
agtaactccaaatcg

SEQ ID NO: 53004 - DNA, 15 bp, Homo sapiens
gtaactccaaatcgt

SEQ ID NO: 53005 - DNA, 15 bp, Homo sapiens
taactccaaatcgtc

SEQ ID NO: 53006 - DNA, 15 bp, Homo sapiens
aactccaaatcgtcc

SEQ ID NO: 53007 - DNA, 15 bp, Homo sapiens
actccaaatcgtccc

SEQ ID NO: 53008 - DNA, 15 bp, Homo sapiens
ctccaaatcgtccct

SEQ ID NO: 53009 - DNA, 15 bp, Homo sapiens
tccaaatcgtccctt

SEQ ID NO: 53010 - DNA, 15 bp, Homo sapiens
ccaaatcgtcccttc

SEQ ID NO: 53011 - DNA, 15 bp, Homo sapiens
caaatcgtcccttct

SEQ ID NO: 53012 - DNA, 15 bp, Homo sapiens
aaatcgtcccttcta

SEQ ID NO: 53013 - DNA, 15 bp, Homo sapiens
aatcgtcccttctac

SEQ ID NO: 53014 - DNA, 15 bp, Homo sapiens
atcgtcccttctacc

SEQ ID NO: 53015 - DNA, 15 bp, Homo sapiens
tcgtcccttctaccg

SEQ ID NO: 53016 - DNA, 15 bp, Homo sapiens
cgtcccttctaccgg

SEQ ID NO: 53017 - DNA, 15 bp, Homo sapiens
gtcccttctaccgga

SEQ ID NO: 53018 - DNA, 15 bp, Homo sapiens
tcccttctaccggag

SEQ ID NO: 53019 - DNA, 15 bp, Homo sapiens
cccttctaccggagg

SEQ ID NO: 53020 - DNA, 15 bp, Homo sapiens
ccttctaccggaggg

SEQ ID NO: 53021 - DNA, 15 bp, Homo sapiens
cttctaccggagggg

SEQ ID NO: 53022 - DNA, 15 bp, Homo sapiens
ttctaccggagggga

SEQ ID NO: 53023 - DNA, 15 bp, Homo sapiens
tctaccggaggggag

SEQ ID NO: 53024 - DNA, 15 bp, Homo sapiens
ctaccggaggggagg

SEQ ID NO: 53025 - DNA, 15 bp, Homo sapiens
taccggaggggagga

SEQ ID NO: 53026 - DNA, 15 bp, Homo sapiens
accggaggggaggaa

SEQ ID NO: 53027 - DNA, 15 bp, Homo sapiens
ccggaggggaggaaa

SEQ ID NO: 53028 - DNA, 15 bp, Homo sapiens
cggaggggaggaaag

SEQ ID NO: 53029 - DNA, 15 bp, Homo sapiens
ggaggggaggaaaga

SEQ ID NO: 53030 - DNA, 15 bp, Homo sapiens
gaggggaggaaagaa

SEQ ID NO: 53031 - DNA, 15 bp, Homo sapiens
aggggaggaaagaag

SEQ ID NO: 53032 - DNA, 15 bp, Homo sapiens
ggggaggaaagaagg

SEQ ID NO: 53033 - DNA, 15 bp, Homo sapiens
gggaggaaagaagga

SEQ ID NO: 53034 - DNA, 15 bp, Homo sapiens
ggaggaaagaaggag

SEQ ID NO: 53035 - DNA, 15 bp, Homo sapiens
gaggaaagaaggaga

SEQ ID NO: 53036 - DNA, 15 bp, Homo sapiens
aggaaagaaggagac

SEQ ID NO: 53037 - DNA, 15 bp, Homo sapiens
ggaaagaaggagact

SEQ ID NO: 53038 - DNA, 15 bp, Homo sapiens
gaaagaaggagactg

SEQ ID NO: 53039 - DNA, 15 bp, Homo sapiens
aaagaaggagactgg

SEQ ID NO: 53040 - DNA, 15 bp, Homo sapiens
aagaaggagactggc

SEQ ID NO: 53041 - DNA, 15 bp, Homo sapiens
agaaggagactggcc

SEQ ID NO: 53042 - DNA, 15 bp, Homo sapiens
gaaggagactggcct

SEQ ID NO: 53043 - DNA, 15 bp, Homo sapiens
aaggagactggcctc

SEQ ID NO: 53044 - DNA, 15 bp, Homo sapiens
aggagactggcctcg

SEQ ID NO: 53045 - DNA, 15 bp, Homo sapiens
ggagactggcctcgt

SEQ ID NO: 53046 - DNA, 15 bp, Homo sapiens
gagactggcctcgtc

SEQ ID NO: 53047 - DNA, 15 bp, Homo sapiens
agactggcctcgtcc

SEQ ID NO: 53048 - DNA, 15 bp, Homo sapiens
gactggcctcgtccc

SEQ ID NO: 53049 - DNA, 15 bp, Homo sapiens
actggcctcgtccca

SEQ ID NO: 53050 - DNA, 15 bp, Homo sapiens
ctggcctcgtcccac

SEQ ID NO: 53051 - DNA, 15 bp, Homo sapiens
tggcctcgtcccaca

SEQ ID NO: 53052 - DNA, 15 bp, Homo sapiens
ggcctcgtcccacaa

SEQ ID NO: 53053 - DNA, 15 bp, Homo sapiens
gcctcgtcccacaac

SEQ ID NO: 53054 - DNA, 15 bp, Homo sapiens
cctcgtcccacaact

SEQ ID NO: 53055 - DNA, 15 bp, Homo sapiens
ctcgtcccacaactt

SEQ ID NO: 53056 - DNA, 15 bp, Homo sapiens
tcgtcccacaacttt

SEQ ID NO: 53057 - DNA, 15 bp, Homo sapiens
cgtcccacaactttg

SEQ ID NO: 53058 - DNA, 15 bp, Homo sapiens
gtcccacaactttgg

SEQ ID NO: 53059 - DNA, 15 bp, Homo sapiens
tcccacaactttggg

SEQ ID NO: 53060 - DNA, 15 bp, Homo sapiens
cccacaactttgggg

SEQ ID NO: 53061 - DNA, 15 bp, Homo sapiens
ccacaactttggggt

SEQ ID NO: 53062 - DNA, 15 bp, Homo sapiens
cacaactttggggtg

SEQ ID NO: 53063 - DNA, 15 bp, Homo sapiens
acaactttggggtgg

SEQ ID NO: 53064 - DNA, 15 bp, Homo sapiens
caactttggggtggg

SEQ ID NO: 53065 - DNA, 15 bp, Homo sapiens
aactttggggtgggg

SEQ ID NO: 53066 - DNA, 15 bp, Homo sapiens
actttggggtggggg

SEQ ID NO: 53067 - DNA, 15 bp, Homo sapiens
ctttggggtggggga

SEQ ID NO: 53068 - DNA, 15 bp, Homo sapiens
tttggggtgggggat

SEQ ID NO: 53069 - DNA, 15 bp, Homo sapiens
ttggggtgggggatc

SEQ ID NO: 53070 - DNA, 15 bp, Homo sapiens
tggggtgggggatcc

SEQ ID NO: 53071 - DNA, 15 bp, Homo sapiens
ggggtgggggatccc

SEQ ID NO: 53072 - DNA, 15 bp, Homo sapiens
gggtgggggatcccc

SEQ ID NO: 53073 - DNA, 15 bp, Homo sapiens
ggtgggggatccccc

SEQ ID NO: 53074 - DNA, 15 bp, Homo sapiens
gtgggggatccccca

SEQ ID NO: 53075 - DNA, 15 bp, Homo sapiens
tgggggatcccccag

SEQ ID NO: 53076 - DNA, 15 bp, Homo sapiens
gggggatcccccagt

SEQ ID NO: 53077 - DNA, 15 bp, Homo sapiens
ggggatcccccagtc

SEQ ID NO: 53078 - DNA, 15 bp, Homo sapiens
gggatcccccagtca

SEQ ID NO: 53079 - DNA, 15 bp, Homo sapiens
ggatcccccagtcaa

SEQ ID NO: 53080 - DNA, 15 bp, Homo sapiens
gatcccccagtcaac

SEQ ID NO: 53081 - DNA, 15 bp, Homo sapiens
atcccccagtcaact

SEQ ID NO: 53082 - DNA, 15 bp, Homo sapiens
tcccccagtcaactc

SEQ ID NO: 53083 - DNA, 15 bp, Homo sapiens
cccccagtcaactct

SEQ ID NO: 53084 - DNA, 15 bp, Homo sapiens
ccccagtcaactctc

SEQ ID NO: 53085 - DNA, 15 bp, Homo sapiens
cccagtcaactctct

SEQ ID NO: 53086 - DNA, 15 bp, Homo sapiens
ccagtcaactctctc

SEQ ID NO: 53087 - DNA, 15 bp, Homo sapiens
cagtcaactctctcc

SEQ ID NO: 53088 - DNA, 15 bp, Homo sapiens
agtcaactctctccc

SEQ ID NO: 53089 - DNA, 15 bp, Homo sapiens
gtcaactctctcccg

SEQ ID NO: 53090 - DNA, 15 bp, Homo sapiens
tcaactctctcccgc

SEQ ID NO: 53091 - DNA, 15 bp, Homo sapiens
caactctctcccgcg

SEQ ID NO: 53092 - DNA, 15 bp, Homo sapiens
aactctctcccgcgg

SEQ ID NO: 53093 - DNA, 15 bp, Homo sapiens
actctctcccgcgga

SEQ ID NO: 53094 - DNA, 15 bp, Homo sapiens
ctctctcccgcggac

SEQ ID NO: 53095 - DNA, 15 bp, Homo sapiens
tctctcccgcggacg

SEQ ID NO: 53096 - DNA, 15 bp, Homo sapiens
ctctcccgcggacgg

SEQ ID NO: 53097 - DNA, 15 bp, Homo sapiens
tctcccgcggacggg

SEQ ID NO: 53098 - DNA, 15 bp, Homo sapiens
ctcccgcggacgggc

SEQ ID NO: 53099 - DNA, 15 bp, Homo sapiens
tcccgcggacgggca

SEQ ID NO: 53100 - DNA, 15 bp, Homo sapiens
cccgcggacgggcag

SEQ ID NO: 53101 - DNA, 15 bp, Homo sapiens
ccgcggacgggcagc

SEQ ID NO: 53102 - DNA, 15 bp, Homo sapiens
cgcggacgggcagct

SEQ ID NO: 53103 - DNA, 15 bp, Homo sapiens
gcggacgggcagctc

SEQ ID NO: 53104 - DNA, 15 bp, Homo sapiens
cggacgggcagctcc

SEQ ID NO: 53105 - DNA, 15 bp, Homo sapiens
ggacgggcagctcct

SEQ ID NO: 53106 - DNA, 15 bp, Homo sapiens
gacgggcagctcctg

SEQ ID NO: 53107 - DNA, 15 bp, Homo sapiens
acgggcagctcctgc

SEQ ID NO: 53108 - DNA, 15 bp, Homo sapiens
cgggcagctcctgca

SEQ ID NO: 53109 - DNA, 15 bp, Homo sapiens
gggcagctcctgcac

SEQ ID NO: 53110 - DNA, 15 bp, Homo sapiens
ggcagctcctgcacc

SEQ ID NO: 53111 - DNA, 15 bp, Homo sapiens
gcagctcctgcacca

SEQ ID NO: 53112 - DNA, 15 bp, Homo sapiens
cagctcctgcaccaa

SEQ ID NO: 53113 - DNA, 15 bp, Homo sapiens
agctcctgcaccaag

SEQ ID NO: 53114 - DNA, 15 bp, Homo sapiens
gctcctgcaccaagc

SEQ ID NO: 53115 - DNA, 15 bp, Homo sapiens
ctcctgcaccaagcc

SEQ ID NO: 53116 - DNA, 15 bp, Homo sapiens
tcctgcaccaagccc

SEQ ID NO: 53117 - DNA, 15 bp, Homo sapiens
cctgcaccaagcccc

SEQ ID NO: 53118 - DNA, 15 bp, Homo sapiens
ctgcaccaagcccca

SEQ ID NO: 53119 - DNA, 15 bp, Homo sapiens
tgcaccaagccccat

SEQ ID NO: 53120 - DNA, 15 bp, Homo sapiens
gcaccaagccccatt

SEQ ID NO: 53121 - DNA, 15 bp, Homo sapiens
caccaagccccattc

SEQ ID NO: 53122 - DNA, 15 bp, Homo sapiens
accaagccccattcc

SEQ ID NO: 53123 - DNA, 15 bp, Homo sapiens
ccaagccccattccc

SEQ ID NO: 53124 - DNA, 15 bp, Homo sapiens
caagccccattccca

SEQ ID NO: 53125 - DNA, 15 bp, Homo sapiens
aagccccattcccag

SEQ ID NO: 53126 - DNA, 15 bp, Homo sapiens
agccccattcccagc

SEQ ID NO: 53127 - DNA, 15 bp, Homo sapiens
gccccattcccagcg

SEQ ID NO: 53128 - DNA, 15 bp, Homo sapiens
ccccattcccagcgc

SEQ ID NO: 53129 - DNA, 15 bp, Homo sapiens
cccattcccagcgct

SEQ ID NO: 53130 - DNA, 15 bp, Homo sapiens
ccattcccagcgctt

SEQ ID NO: 53131 - DNA, 15 bp, Homo sapiens
cattcccagcgcttg

SEQ ID NO: 53132 - DNA, 15 bp, Homo sapiens
attcccagcgcttgc

SEQ ID NO: 53133 - DNA, 15 bp, Homo sapiens
ttcccagcgcttgcc

SEQ ID NO: 53134 - DNA, 15 bp, Homo sapiens
tcccagcgcttgcct

SEQ ID NO: 53135 - DNA, 15 bp, Homo sapiens
cccagcgcttgccta

SEQ ID NO: 53136 - DNA, 15 bp, Homo sapiens
ccagcgcttgcctac

SEQ ID NO: 53137 - DNA, 15 bp, Homo sapiens
cagcgcttgcctacc

SEQ ID NO: 53138 - DNA, 15 bp, Homo sapiens
agcgcttgcctacct

SEQ ID NO: 53139 - DNA, 15 bp, Homo sapiens
gcgcttgcctacctc

SEQ ID NO: 53140 - DNA, 15 bp, Homo sapiens
cgcttgcctacctcg

SEQ ID NO: 53141 - DNA, 15 bp, Homo sapiens
gcttgcctacctcgg

SEQ ID NO: 53142 - DNA, 15 bp, Homo sapiens
cttgcctacctcggg

SEQ ID NO: 53143 - DNA, 15 bp, Homo sapiens
ttgcctacctcgggg

SEQ ID NO: 53144 - DNA, 15 bp, Homo sapiens
tgcctacctcggggt

SEQ ID NO: 53145 - DNA, 15 bp, Homo sapiens
gcctacctcggggtc

SEQ ID NO: 53146 - DNA, 15 bp, Homo sapiens
cctacctcggggtcc

SEQ ID NO: 53147 - DNA, 15 bp, Homo sapiens
ctacctcggggtcca

SEQ ID NO: 53148 - DNA, 15 bp, Homo sapiens
tacctcggggtccac

SEQ ID NO: 53149 - DNA, 15 bp, Homo sapiens
acctcggggtccaca

SEQ ID NO: 53150 - DNA, 15 bp, Homo sapiens
cctcggggtccacac

SEQ ID NO: 53151 - DNA, 15 bp, Homo sapiens
ctcggggtccacaca

SEQ ID NO: 53152 - DNA, 15 bp, Homo sapiens
tcggggtccacacaa

SEQ ID NO: 53153 - DNA, 15 bp, Homo sapiens
cggggtccacacaaa

SEQ ID NO: 53154 - DNA, 15 bp, Homo sapiens
ggggtccacacaaac

SEQ ID NO: 53155 - DNA, 15 bp, Homo sapiens
gggtccacacaaacc

SEQ ID NO: 53156 - DNA, 15 bp, Homo sapiens
ggtccacacaaacct

SEQ ID NO: 53157 - DNA, 15 bp, Homo sapiens
gtccacacaaacctc

SEQ ID NO: 53158 - DNA, 15 bp, Homo sapiens
tccacacaaacctca

SEQ ID NO: 53159 - DNA, 15 bp, Homo sapiens
ccacacaaacctcac

SEQ ID NO: 53160 - DNA, 15 bp, Homo sapiens
cacacaaacctcacg

SEQ ID NO: 53161 - DNA, 15 bp, Homo sapiens
acacaaacctcacgg

SEQ ID NO: 53162 - DNA, 15 bp, Homo sapiens
cacaaacctcacggg

SEQ ID NO: 53163 - DNA, 15 bp, Homo sapiens
acaaacctcacgggt

SEQ ID NO: 53164 - DNA, 15 bp, Homo sapiens
caaacctcacgggtc

SEQ ID NO: 53165 - DNA, 15 bp, Homo sapiens
aaacctcacgggtcc

SEQ ID NO: 53166 - DNA, 15 bp, Homo sapiens
aacctcacgggtccc

SEQ ID NO: 53167 - DNA, 15 bp, Homo sapiens
acctcacgggtcccc

SEQ ID NO: 53168 - DNA, 15 bp, Homo sapiens
cctcacgggtccccg

SEQ ID NO: 53169 - DNA, 15 bp, Homo sapiens
ctcacgggtccccgg

SEQ ID NO: 53170 - DNA, 15 bp, Homo sapiens
tcacgggtccccggc

SEQ ID NO: 53171 - DNA, 15 bp, Homo sapiens
cacgggtccccggcg

SEQ ID NO: 53172 - DNA, 15 bp, Homo sapiens
acgggtccccggcgg

SEQ ID NO: 53173 - DNA, 15 bp, Homo sapiens
cgggtccccggcggc

SEQ ID NO: 53174 - DNA, 15 bp, Homo sapiens
gggtccccggcggcg

SEQ ID NO: 53175 - DNA, 15 bp, Homo sapiens
ggtccccggcggcgg

SEQ ID NO: 53176 - DNA, 15 bp, Homo sapiens
gtccccggcggcgga

SEQ ID NO: 53177 - DNA, 15 bp, Homo sapiens
tccccggcggcggag

SEQ ID NO: 53178 - DNA, 15 bp, Homo sapiens
ccccggcggcggagt

SEQ ID NO: 53179 - DNA, 15 bp, Homo sapiens
cccggcggcggagtc

SEQ ID NO: 53180 - DNA, 15 bp, Homo sapiens
ccggcggcggagtca

SEQ ID NO: 53181 - DNA, 15 bp, Homo sapiens
cggcggcggagtcac

SEQ ID NO: 53182 - DNA, 15 bp, Homo sapiens
ggcggcggagtcaca

SEQ ID NO: 53183 - DNA, 15 bp, Homo sapiens
gcggcggagtcacat

SEQ ID NO: 53184 - DNA, 15 bp, Homo sapiens
cggcggagtcacatc

SEQ ID NO: 53185 - DNA, 15 bp, Homo sapiens
ggcggagtcacatcg

SEQ ID NO: 53186 - DNA, 15 bp, Homo sapiens
gcggagtcacatcgt

SEQ ID NO: 53187 - DNA, 15 bp, Homo sapiens
cggagtcacatcgtg

SEQ ID NO: 53188 - DNA, 15 bp, Homo sapiens
ggagtcacatcgtgg

SEQ ID NO: 53189 - DNA, 15 bp, Homo sapiens
gagtcacatcgtggt

SEQ ID NO: 53190 - DNA, 15 bp, Homo sapiens
agtcacatcgtggtt

SEQ ID NO: 53191 - DNA, 15 bp, Homo sapiens
gtcacatcgtggttc

SEQ ID NO: 53192 - DNA, 15 bp, Homo sapiens
tcacatcgtggttcc

SEQ ID NO: 53193 - DNA, 15 bp, Homo sapiens
cacatcgtggttccg

SEQ ID NO: 53194 - DNA, 15 bp, Homo sapiens
acatcgtggttccga

SEQ ID NO: 53195 - DNA, 15 bp, Homo sapiens
catcgtggttccgat

SEQ ID NO: 53196 - DNA, 15 bp, Homo sapiens
atcgtggttccgatt

SEQ ID NO: 53197 - DNA, 15 bp, Homo sapiens
tcgtggttccgattc

SEQ ID NO: 53198 - DNA, 15 bp, Homo sapiens
cgtggttccgattct

SEQ ID NO: 53199 - DNA, 15 bp, Homo sapiens
gtggttccgattctg

SEQ ID NO: 53200 - DNA, 15 bp, Homo sapiens
tggttccgattctgg

SEQ ID NO: 53201 - DNA, 15 bp, Homo sapiens
ggttccgattctggc

SEQ ID NO: 53202 - DNA, 15 bp, Homo sapiens
gttccgattctggct

SEQ ID NO: 53203 - DNA, 15 bp, Homo sapiens
ttccgattctggctc

SEQ ID NO: 53204 - DNA, 15 bp, Homo sapiens
tccgattctggctcc

SEQ ID NO: 53205 - DNA, 15 bp, Homo sapiens
ccgattctggctcca

SEQ ID NO: 53206 - DNA, 15 bp, Homo sapiens
cgattctggctccag

SEQ ID NO: 53207 - DNA, 15 bp, Homo sapiens
gattctggctccagc

SEQ ID NO: 53208 - DNA, 15 bp, Homo sapiens
attctggctccagcg

SEQ ID NO: 53209 - DNA, 15 bp, Homo sapiens
ttctggctccagcgc

SEQ ID NO: 53210 - DNA, 15 bp, Homo sapiens
tctggctccagcgcc

SEQ ID NO: 53211 - DNA, 15 bp, Homo sapiens
ctggctccagcgccc

SEQ ID NO: 53212 - DNA, 15 bp, Homo sapiens
tggctccagcgccca

SEQ ID NO: 53213 - DNA, 15 bp, Homo sapiens
ggctccagcgcccag

SEQ ID NO: 53214 - DNA, 15 bp, Homo sapiens
gctccagcgcccagc

SEQ ID NO: 53215 - DNA, 15 bp, Homo sapiens
ctccagcgcccagcc

SEQ ID NO: 53216 - DNA, 15 bp, Homo sapiens
tccagcgcccagccc

SEQ ID NO: 53217 - DNA, 15 bp, Homo sapiens
ccagcgcccagcccc

SEQ ID NO: 53218 - DNA, 15 bp, Homo sapiens
cagcgcccagccccg

SEQ ID NO: 53219 - DNA, 15 bp, Homo sapiens
agcgcccagccccgg

SEQ ID NO: 53220 - DNA, 15 bp, Homo sapiens
gcgcccagccccggt

SEQ ID NO: 53221 - DNA, 15 bp, Homo sapiens
cgcccagccccggtc

SEQ ID NO: 53222 - DNA, 15 bp, Homo sapiens
gcccagccccggtcc

SEQ ID NO: 53223 - DNA, 15 bp, Homo sapiens
cccagccccggtccc

SEQ ID NO: 53224 - DNA, 15 bp, Homo sapiens
ccagccccggtcccc

SEQ ID NO: 53225 - DNA, 15 bp, Homo sapiens
cagccccggtccccg

SEQ ID NO: 53226 - DNA, 15 bp, Homo sapiens
agccccggtccccgt

SEQ ID NO: 53227 - DNA, 15 bp, Homo sapiens
gccccggtccccgtc

SEQ ID NO: 53228 - DNA, 15 bp, Homo sapiens
ccccggtccccgtcg

SEQ ID NO: 53229 - DNA, 15 bp, Homo sapiens
cccggtccccgtcgc

SEQ ID NO: 53230 - DNA, 15 bp, Homo sapiens
ccggtccccgtcgcg

SEQ ID NO: 53231 - DNA, 15 bp, Homo sapiens
cggtccccgtcgcgg

SEQ ID NO: 53232 - DNA, 15 bp, Homo sapiens
ggtccccgtcgcggt

SEQ ID NO: 53233 - DNA, 15 bp, Homo sapiens
gtccccgtcgcggtg

SEQ ID NO: 53234 - DNA, 15 bp, Homo sapiens
tccccgtcgcggtgc

SEQ ID NO: 53235 - DNA, 15 bp, Homo sapiens
ccccgtcgcggtgct

SEQ ID NO: 53236 - DNA, 15 bp, Homo sapiens
cccgtcgcggtgctg

SEQ ID NO: 53237 - DNA, 15 bp, Homo sapiens
ccgtcgcggtgctgc

SEQ ID NO: 53238 - DNA, 15 bp, Homo sapiens
cgtcgcggtgctgct

SEQ ID NO: 53239 - DNA, 15 bp, Homo sapiens
gtcgcggtgctgctc

SEQ ID NO: 53240 - DNA, 15 bp, Homo sapiens
tcgcggtgctgctcc

SEQ ID NO: 53241 - DNA, 15 bp, Homo sapiens
cgcggtgctgctccc

SEQ ID NO: 53242 - DNA, 15 bp, Homo sapiens
gcggtgctgctcccc

SEQ ID NO: 53243 - DNA, 15 bp, Homo sapiens
cggtgctgctccccg

SEQ ID NO: 53244 - DNA, 15 bp, Homo sapiens
ggtgctgctccccgc

SEQ ID NO: 53245 - DNA, 15 bp, Homo sapiens
gtgctgctccccgcc

SEQ ID NO: 53246 - DNA, 15 bp, Homo sapiens
tgctgctccccgccg

SEQ ID NO: 53247 - DNA, 15 bp, Homo sapiens
gctgctccccgccgg

SEQ ID NO: 53248 - DNA, 15 bp, Homo sapiens
ctgctccccgccggc

SEQ ID NO: 53249 - DNA, 15 bp, Homo sapiens
tgctccccgccggcc

SEQ ID NO: 53250 - DNA, 15 bp, Homo sapiens
gctccccgccggccc

SEQ ID NO: 53251 - DNA, 15 bp, Homo sapiens
ctccccgccggcccc

SEQ ID NO: 53252 - DNA, 15 bp, Homo sapiens
tccccgccggcccca

SEQ ID NO: 53253 - DNA, 15 bp, Homo sapiens
ccccgccggccccac

SEQ ID NO: 53254 - DNA, 15 bp, Homo sapiens
cccgccggccccaca

SEQ ID NO: 53255 - DNA, 15 bp, Homo sapiens
ccgccggccccacag

SEQ ID NO: 53256 - DNA, 15 bp, Homo sapiens
cgccggccccacagc

SEQ ID NO: 53257 - DNA, 15 bp, Homo sapiens
gccggccccacagca

SEQ ID NO: 53258 - DNA, 15 bp, Homo sapiens
ccggccccacagcag

SEQ ID NO: 53259 - DNA, 15 bp, Homo sapiens
cggccccacagcagc

SEQ ID NO: 53260 - DNA, 15 bp, Homo sapiens
ggccccacagcagcg

SEQ ID NO: 53261 - DNA, 15 bp, Homo sapiens
gccccacagcagcgg

SEQ ID NO: 53262 - DNA, 15 bp, Homo sapiens
ccccacagcagcggt

SEQ ID NO: 53263 - DNA, 15 bp, Homo sapiens
cccacagcagcggtg

SEQ ID NO: 53264 - DNA, 15 bp, Homo sapiens
ccacagcagcggtgg

SEQ ID NO: 53265 - DNA, 15 bp, Homo sapiens
cacagcagcggtggg

SEQ ID NO: 53266 - DNA, 15 bp, Homo sapiens
acagcagcggtgggt

SEQ ID NO: 53267 - DNA, 15 bp, Homo sapiens
cagcagcggtgggtg

SEQ ID NO: 53268 - DNA, 15 bp, Homo sapiens
agcagcggtgggtgt

SEQ ID NO: 53269 - DNA, 15 bp, Homo sapiens
gcagcggtgggtgtc

SEQ ID NO: 53270 - DNA, 15 bp, Homo sapiens
cagcggtgggtgtct

SEQ ID NO: 53271 - DNA, 15 bp, Homo sapiens
agcggtgggtgtctc

SEQ ID NO: 53272 - DNA, 15 bp, Homo sapiens
gcggtgggtgtctca

SEQ ID NO: 53273 - DNA, 15 bp, Homo sapiens
cggtgggtgtctcat

SEQ ID NO: 53274 - DNA, 15 bp, Homo sapiens
ggtgggtgtctcatt

SEQ ID NO: 53275 - DNA, 15 bp, Homo sapiens
gtgggtgtctcatta

SEQ ID NO: 53276 - DNA, 15 bp, Homo sapiens
tgggtgtctcattaa

SEQ ID NO: 53277 - DNA, 15 bp, Homo sapiens
gggtgtctcattaaa

SEQ ID NO: 53278 - DNA, 15 bp, Homo sapiens
ggtgtctcattaaag

SEQ ID NO: 53279 - DNA, 15 bp, Homo sapiens
gtgtctcattaaagc

SEQ ID NO: 53280 - DNA, 15 bp, Homo sapiens
tgtctcattaaagcc

SEQ ID NO: 53281 - DNA, 15 bp, Homo sapiens
gtctcattaaagccc

SEQ ID NO: 53282 - DNA, 15 bp, Homo sapiens
tctcattaaagcccc

SEQ ID NO: 53283 - DNA, 15 bp, Homo sapiens
ctcattaaagccccc

SEQ ID NO: 53284 - DNA, 15 bp, Homo sapiens
tcattaaagcccccc

SEQ ID NO: 53285 - DNA, 15 bp, Homo sapiens
cattaaagccccccg

SEQ ID NO: 53286 - DNA, 15 bp, Homo sapiens
attaaagccccccga

SEQ ID NO: 53287 - DNA, 15 bp, Homo sapiens
ttaaagccccccgag

SEQ ID NO: 53288 - DNA, 15 bp, Homo sapiens
taaagccccccgagc

SEQ ID NO: 53289 - DNA, 15 bp, Homo sapiens
aaagccccccgagca

SEQ ID NO: 53290 - DNA, 15 bp, Homo sapiens
aagccccccgagcag

SEQ ID NO: 53291 - DNA, 15 bp, Homo sapiens
agccccccgagcagg

SEQ ID NO: 53292 - DNA, 15 bp, Homo sapiens
gccccccgagcagga

SEQ ID NO: 53293 - DNA, 15 bp, Homo sapiens
ccccccgagcaggag

SEQ ID NO: 53294 - DNA, 15 bp, Homo sapiens
cccccgagcaggagg

SEQ ID NO: 53295 - DNA, 15 bp, Homo sapiens
ccccgagcaggaggt

SEQ ID NO: 53296 - DNA, 15 bp, Homo sapiens
cccgagcaggaggtg

SEQ ID NO: 53297 - DNA, 15 bp, Homo sapiens
ccgagcaggaggtgg

SEQ ID NO: 53298 - DNA, 15 bp, Homo sapiens
cgagcaggaggtgga

SEQ ID NO: 53299 - DNA, 15 bp, Homo sapiens
gagcaggaggtggag

SEQ ID NO: 53300 - DNA, 15 bp, Homo sapiens
agcaggaggtggagg

SEQ ID NO: 53301 - DNA, 15 bp, Homo sapiens
gcaggaggtggaggg

SEQ ID NO: 53302 - DNA, 15 bp, Homo sapiens
caggaggtggagggg

SEQ ID NO: 53303 - DNA, 15 bp, Homo sapiens
aggaggtggaggggc

SEQ ID NO: 53304 - DNA, 15 bp, Homo sapiens
ggaggtggaggggcg

SEQ ID NO: 53305 - DNA, 15 bp, Homo sapiens
gaggtggaggggcgc

SEQ ID NO: 53306 - DNA, 15 bp, Homo sapiens
aggtggaggggcgca

SEQ ID NO: 53307 - DNA, 15 bp, Homo sapiens
ggtggaggggcgcac

SEQ ID NO: 53308 - DNA, 15 bp, Homo sapiens
gtggaggggcgcacc

SEQ ID NO: 53309 - DNA, 15 bp, Homo sapiens
tggaggggcgcaccg

SEQ ID NO: 53310 - DNA, 15 bp, Homo sapiens
ggaggggcgcaccgg

SEQ ID NO: 53311 - DNA, 15 bp, Homo sapiens
gaggggcgcaccggg

SEQ ID NO: 53312 - DNA, 15 bp, Homo sapiens
aggggcgcaccgggc

SEQ ID NO: 53313 - DNA, 15 bp, Homo sapiens
ggggcgcaccgggct

SEQ ID NO: 53314 - DNA, 15 bp, Homo sapiens
gggcgcaccgggctg

SEQ ID NO: 53315 - DNA, 15 bp, Homo sapiens
ggcgcaccgggctgg

SEQ ID NO: 53316 - DNA, 15 bp, Homo sapiens
gcgcaccgggctggc

SEQ ID NO: 53317 - DNA, 15 bp, Homo sapiens
cgcaccgggctggct

SEQ ID NO: 53318 - DNA, 15 bp, Homo sapiens
gcaccgggctggctc

SEQ ID NO: 53319 - DNA, 15 bp, Homo sapiens
caccgggctggctcc

SEQ ID NO: 53320 - DNA, 15 bp, Homo sapiens
accgggctggctcct

SEQ ID NO: 53321 - DNA, 15 bp, Homo sapiens
ccgggctggctcctc

SEQ ID NO: 53322 - DNA, 15 bp, Homo sapiens
cgggctggctcctct

SEQ ID NO: 53323 - DNA, 15 bp, Homo sapiens
gggctggctcctctg

SEQ ID NO: 53324 - DNA, 15 bp, Homo sapiens
ggctggctcctctgt

SEQ ID NO: 53325 - DNA, 15 bp, Homo sapiens
gctggctcctctgtc

SEQ ID NO: 53326 - DNA, 15 bp, Homo sapiens
ctggctcctctgtcc

SEQ ID NO: 53327 - DNA, 15 bp, Homo sapiens
tggctcctctgtccg

SEQ ID NO: 53328 - DNA, 15 bp, Homo sapiens
ggctcctctgtccgg

SEQ ID NO: 53329 - DNA, 15 bp, Homo sapiens
gctcctctgtccggc

SEQ ID NO: 53330 - DNA, 15 bp, Homo sapiens
ctcctctgtccggcc

SEQ ID NO: 53331 - DNA, 15 bp, Homo sapiens
tcctctgtccggccc

SEQ ID NO: 53332 - DNA, 15 bp, Homo sapiens
cctctgtccggcccg

SEQ ID NO: 53333 - DNA, 15 bp, Homo sapiens
ctctgtccggcccgg

SEQ ID NO: 53334 - DNA, 15 bp, Homo sapiens
tctgtccggcccggg

SEQ ID NO: 53335 - DNA, 15 bp, Homo sapiens
ctgtccggcccggga

SEQ ID NO: 53336 - DNA, 15 bp, Homo sapiens
tgtccggcccgggag

SEQ ID NO: 53337 - DNA, 15 bp, Homo sapiens
gtccggcccgggagc

SEQ ID NO: 53338 - DNA, 15 bp, Homo sapiens
tccggcccgggagcc

SEQ ID NO: 53339 - DNA, 15 bp, Homo sapiens
ccggcccgggagccc

SEQ ID NO: 53340 - DNA, 15 bp, Homo sapiens
cggcccgggagcccg

SEQ ID NO: 53341 - DNA, 15 bp, Homo sapiens
ggcccgggagcccga

SEQ ID NO: 53342 - DNA, 15 bp, Homo sapiens
gcccgggagcccgag

SEQ ID NO: 53343 - DNA, 15 bp, Homo sapiens
cccgggagcccgagg

SEQ ID NO: 53344 - DNA, 15 bp, Homo sapiens
ccgggagcccgaggc

SEQ ID NO: 53345 - DNA, 15 bp, Homo sapiens
cgggagcccgaggcg

SEQ ID NO: 53346 - DNA, 15 bp, Homo sapiens
gggagcccgaggcgc

SEQ ID NO: 53347 - DNA, 15 bp, Homo sapiens
ggagcccgaggcgct

SEQ ID NO: 53348 - DNA, 15 bp, Homo sapiens
gagcccgaggcgcta

SEQ ID NO: 53349 - DNA, 15 bp, Homo sapiens
agcccgaggcgctac

SEQ ID NO: 53350 - DNA, 15 bp, Homo sapiens
gcccgaggcgctacg

SEQ ID NO: 53351 - DNA, 15 bp, Homo sapiens
cccgaggcgctacgg

SEQ ID NO: 53352 - DNA, 15 bp, Homo sapiens
ccgaggcgctacggg

SEQ ID NO: 53353 - DNA, 15 bp, Homo sapiens
cgaggcgctacgggg

SEQ ID NO: 53354 - DNA, 15 bp, Homo sapiens
gaggcgctacggggt

SEQ ID NO: 53355 - DNA, 15 bp, Homo sapiens
aggcgctacggggtg

SEQ ID NO: 53356 - DNA, 15 bp, Homo sapiens
ggcgctacggggtgc

SEQ ID NO: 53357 - DNA, 15 bp, Homo sapiens
gcgctacggggtgcg

SEQ ID NO: 53358 - DNA, 15 bp, Homo sapiens
cgctacggggtgcgc

SEQ ID NO: 53359 - DNA, 15 bp, Homo sapiens
gctacggggtgcgcg

SEQ ID NO: 53360 - DNA, 15 bp, Homo sapiens
ctacggggtgcgcgg

SEQ ID NO: 53361 - DNA, 15 bp, Homo sapiens
tacggggtgcgcggg

SEQ ID NO: 53362 - DNA, 15 bp, Homo sapiens
acggggtgcgcggga

SEQ ID NO: 53363 - DNA, 15 bp, Homo sapiens
cggggtgcgcgggac

SEQ ID NO: 53364 - DNA, 15 bp, Homo sapiens
ggggtgcgcgggaca

SEQ ID NO: 53365 - DNA, 15 bp, Homo sapiens
gggtgcgcgggacag

SEQ ID NO: 53366 - DNA, 15 bp, Homo sapiens
ggtgcgcgggacagc

SEQ ID NO: 53367 - DNA, 15 bp, Homo sapiens
gtgcgcgggacagcg

SEQ ID NO: 53368 - DNA, 15 bp, Homo sapiens
tgcgcgggacagcga

SEQ ID NO: 53369 - DNA, 15 bp, Homo sapiens
gcgcgggacagcgag

SEQ ID NO: 53370 - DNA, 15 bp, Homo sapiens
cgcgggacagcgagc

SEQ ID NO: 53371 - DNA, 15 bp, Homo sapiens
gcgggacagcgagcg

SEQ ID NO: 53372 - DNA, 15 bp, Homo sapiens
cgggacagcgagcgg

SEQ ID NO: 53373 - DNA, 15 bp, Homo sapiens
gggacagcgagcggg

SEQ ID NO: 53374 - DNA, 15 bp, Homo sapiens
ggacagcgagcgggc

SEQ ID NO: 53375 - DNA, 15 bp, Homo sapiens
gacagcgagcgggcg

SEQ ID NO: 53376 - DNA, 15 bp, Homo sapiens
acagcgagcgggcgg

SEQ ID NO: 53377 - DNA, 15 bp, Homo sapiens
cagcgagcgggcggg

SEQ ID NO: 53378 - DNA, 15 bp, Homo sapiens
agcgagcgggcgggt

SEQ ID NO: 53379 - DNA, 15 bp, Homo sapiens
gcgagcgggcgggtg

SEQ ID NO: 53380 - DNA, 15 bp, Homo sapiens
cgagcgggcgggtgc

SEQ ID NO: 53381 - DNA, 15 bp, Homo sapiens
gagcgggcgggtgcg

SEQ ID NO: 53382 - DNA, 15 bp, Homo sapiens
agcgggcgggtgcgc

SEQ ID NO: 53383 - DNA, 15 bp, Homo sapiens
gcgggcgggtgcgcc

SEQ ID NO: 53384 - DNA, 15 bp, Homo sapiens
cgggcgggtgcgccc

SEQ ID NO: 53385 - DNA, 15 bp, Homo sapiens
gggcgggtgcgcccg

SEQ ID NO: 53386 - DNA, 15 bp, Homo sapiens
ggcgggtgcgcccgg

SEQ ID NO: 53387 - DNA, 15 bp, Homo sapiens
gcgggtgcgcccggg

SEQ ID NO: 53388 - DNA, 15 bp, Homo sapiens
cgggtgcgcccgggc

SEQ ID NO: 53389 - DNA, 15 bp, Homo sapiens
gggtgcgcccgggcg

SEQ ID NO: 53390 - DNA, 15 bp, Homo sapiens
ggtgcgcccgggcgc

SEQ ID NO: 53391 - DNA, 15 bp, Homo sapiens
gtgcgcccgggcgcg

SEQ ID NO: 53392 - DNA, 15 bp, Homo sapiens
tgcgcccgggcgcgg

SEQ ID NO: 53393 - DNA, 15 bp, Homo sapiens
gcgcccgggcgcggc

SEQ ID NO: 53394 - DNA, 15 bp, Homo sapiens
cgcccgggcgcggcg

SEQ ID NO: 53395 - DNA, 15 bp, Homo sapiens
gcccgggcgcggcgg

SEQ ID NO: 53396 - DNA, 15 bp, Homo sapiens
cccgggcgcggcggc

SEQ ID NO: 53397 - DNA, 15 bp, Homo sapiens
ccgggcgcggcggcg

SEQ ID NO: 53398 - DNA, 15 bp, Homo sapiens
cgggcgcggcggcgg

SEQ ID NO: 53399 - DNA, 15 bp, Homo sapiens
gggcgcggcggcggc

SEQ ID NO: 53400 - DNA, 15 bp, Homo sapiens
ggcgcggcggcggca

SEQ ID NO: 53401 - DNA, 15 bp, Homo sapiens
gcgcggcggcggcag

SEQ ID NO: 53402 - DNA, 15 bp, Homo sapiens
cgcggcggcggcagc

SEQ ID NO: 53403 - DNA, 15 bp, Homo sapiens
gcggcggcggcagcg

SEQ ID NO: 53404 - DNA, 15 bp, Homo sapiens
cggcggcggcagcgt

SEQ ID NO: 53405 - DNA, 15 bp, Homo sapiens
ggcggcggcagcgtc

SEQ ID NO: 53406 - DNA, 15 bp, Homo sapiens
gcggcggcagcgtcg

SEQ ID NO: 53407 - DNA, 15 bp, Homo sapiens
cggcggcagcgtcgg

SEQ ID NO: 53408 - DNA, 15 bp, Homo sapiens
ggcggcagcgtcggg

SEQ ID NO: 53409 - DNA, 15 bp, Homo sapiens
gcggcagcgtcgggg

SEQ ID NO: 53410 - DNA, 15 bp, Homo sapiens
cggcagcgtcgggga

SEQ ID NO: 53411 - DNA, 15 bp, Homo sapiens
ggcagcgtcggggac

SEQ ID NO: 53412 - DNA, 15 bp, Homo sapiens
gcagcgtcggggacc

SEQ ID NO: 53413 - DNA, 15 bp, Homo sapiens
cagcgtcggggaccc

SEQ ID NO: 53414 - DNA, 15 bp, Homo sapiens
agcgtcggggacccg

SEQ ID NO: 53415 - DNA, 15 bp, Homo sapiens
gcgtcggggacccgg

SEQ ID NO: 53416 - DNA, 15 bp, Homo sapiens
cgtcggggacccgga

SEQ ID NO: 53417 - DNA, 15 bp, Homo sapiens
gtcggggacccggag

SEQ ID NO: 53418 - DNA, 15 bp, Homo sapiens
tcggggacccggagc

SEQ ID NO: 53419 - DNA, 15 bp, Homo sapiens
cggggacccggagct

SEQ ID NO: 53420 - DNA, 15 bp, Homo sapiens
ggggacccggagctc

SEQ ID NO: 53421 - DNA, 15 bp, Homo sapiens
gggacccggagctcc

SEQ ID NO: 53422 - DNA, 15 bp, Homo sapiens
ggacccggagctcca

SEQ ID NO: 53423 - DNA, 15 bp, Homo sapiens
gacccggagctccag

SEQ ID NO: 53424 - DNA, 15 bp, Homo sapiens
acccggagctccagg

SEQ ID NO: 53425 - DNA, 15 bp, Homo sapiens
cccggagctccaggc

SEQ ID NO: 53426 - DNA, 15 bp, Homo sapiens
ccggagctccaggct

SEQ ID NO: 53427 - DNA, 15 bp, Homo sapiens
cggagctccaggctg

SEQ ID NO: 53428 - DNA, 15 bp, Homo sapiens
ggagctccaggctgc

SEQ ID NO: 53429 - DNA, 15 bp, Homo sapiens
gagctccaggctgcg

SEQ ID NO: 53430 - DNA, 15 bp, Homo sapiens
agctccaggctgcgc

SEQ ID NO: 53431 - DNA, 15 bp, Homo sapiens
gctccaggctgcgcc

SEQ ID NO: 53432 - DNA, 15 bp, Homo sapiens
ctccaggctgcgcct

SEQ ID NO: 53433 - DNA, 15 bp, Homo sapiens
tccaggctgcgcctt

SEQ ID NO: 53434 - DNA, 15 bp, Homo sapiens
ccaggctgcgccttg

SEQ ID NO: 53435 - DNA, 15 bp, Homo sapiens
caggctgcgccttgc

SEQ ID NO: 53436 - DNA, 15 bp, Homo sapiens
aggctgcgccttgcg

SEQ ID NO: 53437 - DNA, 15 bp, Homo sapiens
ggctgcgccttgcgc

SEQ ID NO: 53438 - DNA, 15 bp, Homo sapiens
gctgcgccttgcgcc

SEQ ID NO: 53439 - DNA, 15 bp, Homo sapiens
ctgcgccttgcgccc

SEQ ID NO: 53440 - DNA, 15 bp, Homo sapiens
tgcgccttgcgcccg

SEQ ID NO: 53441 - DNA, 15 bp, Homo sapiens
gcgccttgcgcccgg

SEQ ID NO: 53442 - DNA, 15 bp, Homo sapiens
cgccttgcgcccggg

SEQ ID NO: 53443 - DNA, 15 bp, Homo sapiens
gccttgcgcccgggt

SEQ ID NO: 53444 - DNA, 15 bp, Homo sapiens
ccttgcgcccgggtc

SEQ ID NO: 53445 - DNA, 15 bp, Homo sapiens
cttgcgcccgggtca

SEQ ID NO: 53446 - DNA, 15 bp, Homo sapiens
ttgcgcccgggtcag

SEQ ID NO: 53447 - DNA, 15 bp, Homo sapiens
tgcgcccgggtcaga

SEQ ID NO: 53448 - DNA, 15 bp, Homo sapiens
gcgcccgggtcagac

SEQ ID NO: 53449 - DNA, 15 bp, Homo sapiens
cgcccgggtcagaca

SEQ ID NO: 53450 - DNA, 15 bp, Homo sapiens
gcccgggtcagacat

SEQ ID NO: 53451 - DNA, 15 bp, Homo sapiens
cccgggtcagacatt

SEQ ID NO: 53452 - DNA, 15 bp, Homo sapiens
ccgggtcagacatta

SEQ ID NO: 53453 - DNA, 15 bp, Homo sapiens
cgggtcagacattat

SEQ ID NO: 53454 - DNA, 15 bp, Homo sapiens
gggtcagacattatt

SEQ ID NO: 53455 - DNA, 15 bp, Homo sapiens
ggtcagacattattt

SEQ ID NO: 53456 - DNA, 15 bp, Homo sapiens
gtcagacattattta

SEQ ID NO: 53457 - DNA, 15 bp, Homo sapiens
tcagacattatttag

SEQ ID NO: 53458 - DNA, 15 bp, Homo sapiens
cagacattatttagc

SEQ ID NO: 53459 - DNA, 15 bp, Homo sapiens
agacattatttagct

SEQ ID NO: 53460 - DNA, 15 bp, Homo sapiens
gacattatttagctc

SEQ ID NO: 53461 - DNA, 15 bp, Homo sapiens
acattatttagctct

SEQ ID NO: 53462 - DNA, 15 bp, Homo sapiens
cattatttagctctt

SEQ ID NO: 53463 - DNA, 15 bp, Homo sapiens
attatttagctcttc

SEQ ID NO: 53464 - DNA, 15 bp, Homo sapiens
ttatttagctcttcg

SEQ ID NO: 53465 - DNA, 15 bp, Homo sapiens
tatttagctcttcgg

SEQ ID NO: 53466 - DNA, 15 bp, Homo sapiens
atttagctcttcggt

SEQ ID NO: 53467 - DNA, 15 bp, Homo sapiens
tttagctcttcggtt

SEQ ID NO: 53468 - DNA, 15 bp, Homo sapiens
ttagctcttcggttg

SEQ ID NO: 53469 - DNA, 15 bp, Homo sapiens
tagctcttcggttga

SEQ ID NO: 53470 - DNA, 15 bp, Homo sapiens
agctcttcggttgag

SEQ ID NO: 53471 - DNA, 15 bp, Homo sapiens
gctcttcggttgagc

SEQ ID NO: 53472 - DNA, 15 bp, Homo sapiens
ctcttcggttgagct

SEQ ID NO: 53473 - DNA, 15 bp, Homo sapiens
tcttcggttgagctt

SEQ ID NO: 53474 - DNA, 15 bp, Homo sapiens
cttcggttgagcttc

SEQ ID NO: 53475 - DNA, 15 bp, Homo sapiens
ttcggttgagcttcg

SEQ ID NO: 53476 - DNA, 15 bp, Homo sapiens
tcggttgagcttcga

SEQ ID NO: 53477 - DNA, 15 bp, Homo sapiens
cggttgagcttcgat

SEQ ID NO: 53478 - DNA, 15 bp, Homo sapiens
ggttgagcttcgatt

SEQ ID NO: 53479 - DNA, 15 bp, Homo sapiens
gttgagcttcgattg

SEQ ID NO: 53480 - DNA, 15 bp, Homo sapiens
ttgagcttcgattgg

SEQ ID NO: 53481 - DNA, 15 bp, Homo sapiens
tgagcttcgattggt

SEQ ID NO: 53482 - DNA, 15 bp, Homo sapiens
gagcttcgattggtc

SEQ ID NO: 53483 - DNA, 15 bp, Homo sapiens
agcttcgattggtca

SEQ ID NO: 53484 - DNA, 15 bp, Homo sapiens
gcttcgattggtcaa

SEQ ID NO: 53485 - DNA, 15 bp, Homo sapiens
cttcgattggtcaaa

SEQ ID NO: 53486 - DNA, 15 bp, Homo sapiens
ttcgattggtcaaac

SEQ ID NO: 53487 - DNA, 15 bp, Homo sapiens
tcgattggtcaaacg

SEQ ID NO: 53488 - DNA, 15 bp, Homo sapiens
cgattggtcaaacgg

SEQ ID NO: 53489 - DNA, 15 bp, Homo sapiens
gattggtcaaacggc

SEQ ID NO: 53490 - DNA, 15 bp, Homo sapiens
attggtcaaacggcg

SEQ ID NO: 53491 - DNA, 15 bp, Homo sapiens
ttggtcaaacggcgc

SEQ ID NO: 53492 - DNA, 15 bp, Homo sapiens
tggtcaaacggcgcc

SEQ ID NO: 53493 - DNA, 15 bp, Homo sapiens
ggtcaaacggcgccg

SEQ ID NO: 53494 - DNA, 15 bp, Homo sapiens
gtcaaacggcgccgc

SEQ ID NO: 53495 - DNA, 15 bp, Homo sapiens
tcaaacggcgccgcc

SEQ ID NO: 53496 - DNA, 15 bp, Homo sapiens
caaacggcgccgccc

SEQ ID NO: 53497 - DNA, 15 bp, Homo sapiens
aaacggcgccgcccc

SEQ ID NO: 53498 - DNA, 15 bp, Homo sapiens
aacggcgccgccccc

SEQ ID NO: 53499 - DNA, 15 bp, Homo sapiens
acggcgccgcccccc

SEQ ID NO: 53500 - DNA, 15 bp, Homo sapiens
cggcgccgccccccc

SEQ ID NO: 53501 - DNA, 15 bp, Homo sapiens
ggcgccgcccccccc

SEQ ID NO: 53502 - DNA, 15 bp, Homo sapiens
gcgccgccccccccc

SEQ ID NO: 53503 - DNA, 15 bp, Homo sapiens
cgccgcccccccccc

SEQ ID NO: 53504 - DNA, 15 bp, Homo sapiens
gccgccccccccccc

SEQ ID NO: 53505 - DNA, 15 bp, Homo sapiens
ccgcccccccccccc

SEQ ID NO: 53506 - DNA, 15 bp, Homo sapiens
cgccccccccccccc

SEQ ID NO: 53507 - DNA, 15 bp, Homo sapiens
gcccccccccccccg

SEQ ID NO: 53508 - DNA, 15 bp, Homo sapiens
cccccccccccccgc

SEQ ID NO: 53509 - DNA, 15 bp, Homo sapiens
ccccccccccccgcc

SEQ ID NO: 53510 - DNA, 15 bp, Homo sapiens
cccccccccccgccc

SEQ ID NO: 53511 - DNA, 15 bp, Homo sapiens
ccccccccccgcccc

SEQ ID NO: 53512 - DNA, 15 bp, Homo sapiens
cccccccccgccccc

SEQ ID NO: 53513 - DNA, 15 bp, Homo sapiens
ccccccccgcccccc

SEQ ID NO: 53514 - DNA, 15 bp, Homo sapiens
cccccccgccccccg

SEQ ID NO: 53515 - DNA, 15 bp, Homo sapiens
ccccccgccccccgc

SEQ ID NO: 53516 - DNA, 15 bp, Homo sapiens
cccccgccccccgcc

SEQ ID NO: 53517 - DNA, 15 bp, Homo sapiens
ccccgccccccgccc

SEQ ID NO: 53518 - DNA, 15 bp, Homo sapiens
cccgccccccgcccc

SEQ ID NO: 53519 - DNA, 15 bp, Homo sapiens
ccgccccccgccccc

SEQ ID NO: 53520 - DNA, 15 bp, Homo sapiens
cgccccccgcccccc

SEQ ID NO: 53521 - DNA, 15 bp, Homo sapiens
gccccccgccccccg

SEQ ID NO: 53522 - DNA, 15 bp, Homo sapiens
cccccgccccccgct

SEQ ID NO: 53523 - DNA, 15 bp, Homo sapiens
ccccgccccccgctc

SEQ ID NO: 53524 - DNA, 15 bp, Homo sapiens
cccgccccccgctcc

SEQ ID NO: 53525 - DNA, 15 bp, Homo sapiens
ccgccccccgctccc

SEQ ID NO: 53526 - DNA, 15 bp, Homo sapiens
cgccccccgctcccc

SEQ ID NO: 53527 - DNA, 15 bp, Homo sapiens
gccccccgctccccg

SEQ ID NO: 53528 - DNA, 15 bp, Homo sapiens
ccccccgctccccgc

SEQ ID NO: 53529 - DNA, 15 bp, Homo sapiens
cccccgctccccgct

SEQ ID NO: 53530 - DNA, 15 bp, Homo sapiens
ccccgctccccgctc

SEQ ID NO: 53531 - DNA, 15 bp, Homo sapiens
cccgctccccgctcg

SEQ ID NO: 53532 - DNA, 15 bp, Homo sapiens
ccgctccccgctcgc

SEQ ID NO: 53533 - DNA, 15 bp, Homo sapiens
cgctccccgctcgcc

SEQ ID NO: 53534 - DNA, 15 bp, Homo sapiens
gctccccgctcgccc

SEQ ID NO: 53535 - DNA, 15 bp, Homo sapiens
ctccccgctcgcccg

SEQ ID NO: 53536 - DNA, 15 bp, Homo sapiens
tccccgctcgcccgc

SEQ ID NO: 53537 - DNA, 15 bp, Homo sapiens
ccccgctcgcccgcg

SEQ ID NO: 53538 - DNA, 15 bp, Homo sapiens
cccgctcgcccgcgc

SEQ ID NO: 53539 - DNA, 15 bp, Homo sapiens
ccgctcgcccgcgct

SEQ ID NO: 53540 - DNA, 15 bp, Homo sapiens
cgctcgcccgcgcta

SEQ ID NO: 53541 - DNA, 15 bp, Homo sapiens
gctcgcccgcgctac

SEQ ID NO: 53542 - DNA, 15 bp, Homo sapiens
ctcgcccgcgctacc

SEQ ID NO: 53543 - DNA, 15 bp, Homo sapiens
tcgcccgcgctaccg

SEQ ID NO: 53544 - DNA, 15 bp, Homo sapiens
cgcccgcgctaccga

SEQ ID NO: 53545 - DNA, 15 bp, Homo sapiens
gcccgcgctaccgat

SEQ ID NO: 53546 - DNA, 15 bp, Homo sapiens
cccgcgctaccgata

SEQ ID NO: 53547 - DNA, 15 bp, Homo sapiens
ccgcgctaccgatac

SEQ ID NO: 53548 - DNA, 15 bp, Homo sapiens
cgcgctaccgatacc

SEQ ID NO: 53549 - DNA, 15 bp, Homo sapiens
gcgctaccgataccc

SEQ ID NO: 53550 - DNA, 15 bp, Homo sapiens
cgctaccgatacccg

SEQ ID NO: 53551 - DNA, 15 bp, Homo sapiens
gctaccgatacccgt

SEQ ID NO: 53552 - DNA, 15 bp, Homo sapiens
ctaccgatacccgtt

SEQ ID NO: 53553 - DNA, 15 bp, Homo sapiens
taccgatacccgttc

SEQ ID NO: 53554 - DNA, 15 bp, Homo sapiens
accgatacccgttcg

SEQ ID NO: 53555 - DNA, 15 bp, Homo sapiens
ccgatacccgttcga

SEQ ID NO: 53556 - DNA, 15 bp, Homo sapiens
cgatacccgttcgag

SEQ ID NO: 53557 - DNA, 15 bp, Homo sapiens
gatacccgttcgagg

SEQ ID NO: 53558 - DNA, 15 bp, Homo sapiens
atacccgttcgaggc

SEQ ID NO: 53559 - DNA, 15 bp, Homo sapiens
tacccgttcgaggcg

SEQ ID NO: 53560 - DNA, 15 bp, Homo sapiens
acccgttcgaggcgg

SEQ ID NO: 53561 - DNA, 15 bp, Homo sapiens
cccgttcgaggcggc

SEQ ID NO: 53562 - DNA, 15 bp, Homo sapiens
ccgttcgaggcggcc

SEQ ID NO: 53563 - DNA, 15 bp, Homo sapiens
cgttcgaggcggccg

SEQ ID NO: 53564 - DNA, 15 bp, Homo sapiens
gttcgaggcggccgc

SEQ ID NO: 53565 - DNA, 15 bp, Homo sapiens
ttcgaggcggccgct

SEQ ID NO: 53566 - DNA, 15 bp, Homo sapiens
tcgaggcggccgctt

SEQ ID NO: 53567 - DNA, 15 bp, Homo sapiens
cgaggcggccgctta

SEQ ID NO: 53568 - DNA, 15 bp, Homo sapiens
gaggcggccgcttaa

SEQ ID NO: 53569 - DNA, 15 bp, Homo sapiens
aggcggccgcttaaa

SEQ ID NO: 53570 - DNA, 15 bp, Homo sapiens
ggcggccgcttaaag

SEQ ID NO: 53571 - DNA, 15 bp, Homo sapiens
gcggccgcttaaagg

SEQ ID NO: 53572 - DNA, 15 bp, Homo sapiens
cggccgcttaaaggg

SEQ ID NO: 53573 - DNA, 15 bp, Homo sapiens
ggccgcttaaaggga

SEQ ID NO: 53574 - DNA, 15 bp, Homo sapiens
gccgcttaaagggaa

SEQ ID NO: 53575 - DNA, 15 bp, Homo sapiens
ccgcttaaagggaac

SEQ ID NO: 53576 - DNA, 15 bp, Homo sapiens
cgcttaaagggaacg

SEQ ID NO: 53577 - DNA, 15 bp, Homo sapiens
gcttaaagggaacgc

SEQ ID NO: 53578 - DNA, 15 bp, Homo sapiens
cttaaagggaacgcc

SEQ ID NO: 53579 - DNA, 15 bp, Homo sapiens
ttaaagggaacgccg

SEQ ID NO: 53580 - DNA, 15 bp, Homo sapiens
taaagggaacgccgc

SEQ ID NO: 53581 - DNA, 15 bp, Homo sapiens
aaagggaacgccgcg

SEQ ID NO: 53582 - DNA, 15 bp, Homo sapiens
aagggaacgccgcgt

SEQ ID NO: 53583 - DNA, 15 bp, Homo sapiens
agggaacgccgcgtc

SEQ ID NO: 53584 - DNA, 15 bp, Homo sapiens
gggaacgccgcgtct

SEQ ID NO: 53585 - DNA, 15 bp, Homo sapiens
ggaacgccgcgtctt

SEQ ID NO: 53586 - DNA, 15 bp, Homo sapiens
gaacgccgcgtcttt

SEQ ID NO: 53587 - DNA, 15 bp, Homo sapiens
aacgccgcgtctttt

SEQ ID NO: 53588 - DNA, 15 bp, Homo sapiens
acgccgcgtcttttc

SEQ ID NO: 53589 - DNA, 15 bp, Homo sapiens
cgccgcgtcttttcc

SEQ ID NO: 53590 - DNA, 15 bp, Homo sapiens
gccgcgtcttttcct

SEQ ID NO: 53591 - DNA, 15 bp, Homo sapiens
ccgcgtcttttcctc

SEQ ID NO: 53592 - DNA, 15 bp, Homo sapiens
cgcgtcttttcctcg

SEQ ID NO: 53593 - DNA, 15 bp, Homo sapiens
gcgtcttttcctcgc

SEQ ID NO: 53594 - DNA, 15 bp, Homo sapiens
cgtcttttcctcgcg

SEQ ID NO: 53595 - DNA, 15 bp, Homo sapiens
gtcttttcctcgcgc

SEQ ID NO: 53596 - DNA, 15 bp, Homo sapiens
tcttttcctcgcgcg

SEQ ID NO: 53597 - DNA, 15 bp, Homo sapiens
cttttcctcgcgcgg

SEQ ID NO: 53598 - DNA, 15 bp, Homo sapiens
ttttcctcgcgcggg

SEQ ID NO: 53599 - DNA, 15 bp, Homo sapiens
tttcctcgcgcgggg

SEQ ID NO: 53600 - DNA, 15 bp, Homo sapiens
ttcctcgcgcgggga

SEQ ID NO: 53601 - DNA, 15 bp, Homo sapiens
tcctcgcgcggggaa

SEQ ID NO: 53602 - DNA, 15 bp, Homo sapiens
cctcgcgcggggaac

SEQ ID NO: 53603 - DNA, 15 bp, Homo sapiens
ctcgcgcggggaacc

SEQ ID NO: 53604 - DNA, 15 bp, Homo sapiens
tcgcgcggggaaccg

SEQ ID NO: 53605 - DNA, 15 bp, Homo sapiens
cgcgcggggaaccga

SEQ ID NO: 53606 - DNA, 15 bp, Homo sapiens
gcgcggggaaccgag

SEQ ID NO: 53607 - DNA, 15 bp, Homo sapiens
cgcggggaaccgagg

SEQ ID NO: 53608 - DNA, 15 bp, Homo sapiens
gcggggaaccgaggg

SEQ ID NO: 53609 - DNA, 15 bp, Homo sapiens
cggggaaccgagggg

SEQ ID NO: 53610 - DNA, 15 bp, Homo sapiens
ggggaaccgaggggc

SEQ ID NO: 53611 - DNA, 15 bp, Homo sapiens
gggaaccgaggggcg

SEQ ID NO: 53612 - DNA, 15 bp, Homo sapiens
ggaaccgaggggcgc

SEQ ID NO: 53613 - DNA, 15 bp, Homo sapiens
gaaccgaggggcgcc

SEQ ID NO: 53614 - DNA, 15 bp, Homo sapiens
aaccgaggggcgccc

SEQ ID NO: 53615 - DNA, 15 bp, Homo sapiens
accgaggggcgcccg

SEQ ID NO: 53616 - DNA, 15 bp, Homo sapiens
ccgaggggcgcccgg

SEQ ID NO: 53617 - DNA, 15 bp, Homo sapiens
cgaggggcgcccgga

SEQ ID NO: 53618 - DNA, 15 bp, Homo sapiens
gaggggcgcccggaa

SEQ ID NO: 53619 - DNA, 15 bp, Homo sapiens
aggggcgcccggaac

SEQ ID NO: 53620 - DNA, 15 bp, Homo sapiens
ggggcgcccggaact

SEQ ID NO: 53621 - DNA, 15 bp, Homo sapiens
gggcgcccggaactc

SEQ ID NO: 53622 - DNA, 15 bp, Homo sapiens
ggcgcccggaactcc

SEQ ID NO: 53623 - DNA, 15 bp, Homo sapiens
gcgcccggaactccc

SEQ ID NO: 53624 - DNA, 15 bp, Homo sapiens
cgcccggaactcccc

SEQ ID NO: 53625 - DNA, 15 bp, Homo sapiens
gcccggaactccccg

SEQ ID NO: 53626 - DNA, 15 bp, Homo sapiens
cccggaactccccgc

SEQ ID NO: 53627 - DNA, 15 bp, Homo sapiens
ccggaactccccgct

SEQ ID NO: 53628 - DNA, 15 bp, Homo sapiens
cggaactccccgctc

SEQ ID NO: 53629 - DNA, 15 bp, Homo sapiens
ggaactccccgctcc

SEQ ID NO: 53630 - DNA, 15 bp, Homo sapiens
gaactccccgctccc

SEQ ID NO: 53631 - DNA, 15 bp, Homo sapiens
aactccccgctcccc

SEQ ID NO: 53632 - DNA, 15 bp, Homo sapiens
actccccgctccccc

SEQ ID NO: 53633 - DNA, 15 bp, Homo sapiens
ctccccgctcccccg

SEQ ID NO: 53634 - DNA, 15 bp, Homo sapiens
tccccgctcccccgg

SEQ ID NO: 53635 - DNA, 15 bp, Homo sapiens
ccccgctcccccggg

SEQ ID NO: 53636 - DNA, 15 bp, Homo sapiens
cccgctcccccgggg

SEQ ID NO: 53637 - DNA, 15 bp, Homo sapiens
ccgctcccccggggc

SEQ ID NO: 53638 - DNA, 15 bp, Homo sapiens
cgctcccccggggcc

SEQ ID NO: 53639 - DNA, 15 bp, Homo sapiens
gctcccccggggcct

SEQ ID NO: 53640 - DNA, 15 bp, Homo sapiens
ctcccccggggcctg

SEQ ID NO: 53641 - DNA, 15 bp, Homo sapiens
tcccccggggcctgt

SEQ ID NO: 53642 - DNA, 15 bp, Homo sapiens
cccccggggcctgtc

SEQ ID NO: 53643 - DNA, 15 bp, Homo sapiens
ccccggggcctgtcc

SEQ ID NO: 53644 - DNA, 15 bp, Homo sapiens
cccggggcctgtcct

SEQ ID NO: 53645 - DNA, 15 bp, Homo sapiens
ccggggcctgtcctc

SEQ ID NO: 53646 - DNA, 15 bp, Homo sapiens
cggggcctgtcctca

SEQ ID NO: 53647 - DNA, 15 bp, Homo sapiens
ggggcctgtcctcac

SEQ ID NO: 53648 - DNA, 15 bp, Homo sapiens
gggcctgtcctcacc

SEQ ID NO: 53649 - DNA, 15 bp, Homo sapiens
ggcctgtcctcacct

SEQ ID NO: 53650 - DNA, 15 bp, Homo sapiens
gcctgtcctcacctc

SEQ ID NO: 53651 - DNA, 15 bp, Homo sapiens
cctgtcctcacctcc

SEQ ID NO: 53652 - DNA, 15 bp, Homo sapiens
ctgtcctcacctcct

SEQ ID NO: 53653 - DNA, 15 bp, Homo sapiens
tgtcctcacctcctc

SEQ ID NO: 53654 - DNA, 15 bp, Homo sapiens
gtcctcacctcctcc

SEQ ID NO: 53655 - DNA, 15 bp, Homo sapiens
tcctcacctcctccc

SEQ ID NO: 53656 - DNA, 15 bp, Homo sapiens
cctcacctcctcccc

SEQ ID NO: 53657 - DNA, 15 bp, Homo sapiens
ctcacctcctcccct

SEQ ID NO: 53658 - DNA, 15 bp, Homo sapiens
tcacctcctccccta

SEQ ID NO: 53659 - DNA, 15 bp, Homo sapiens
cacctcctcccctag

SEQ ID NO: 53660 - DNA, 15 bp, Homo sapiens
acctcctcccctagg

SEQ ID NO: 53661 - DNA, 15 bp, Homo sapiens
cctcctcccctaggg

SEQ ID NO: 53662 - DNA, 15 bp, Homo sapiens
ctcctcccctagggc

SEQ ID NO: 53663 - DNA, 15 bp, Homo sapiens
tcctcccctagggcc

SEQ ID NO: 53664 - DNA, 15 bp, Homo sapiens
cctcccctagggccc

SEQ ID NO: 53665 - DNA, 15 bp, Homo sapiens
ctcccctagggcccc

SEQ ID NO: 53666 - DNA, 15 bp, Homo sapiens
tcccctagggccccg

SEQ ID NO: 53667 - DNA, 15 bp, Homo sapiens
cccctagggccccgc

SEQ ID NO: 53668 - DNA, 15 bp, Homo sapiens
ccctagggccccgcg

SEQ ID NO: 53669 - DNA, 15 bp, Homo sapiens
cctagggccccgcga

SEQ ID NO: 53670 - DNA, 15 bp, Homo sapiens
ctagggccccgcgac

SEQ ID NO: 53671 - DNA, 15 bp, Homo sapiens
tagggccccgcgaca

SEQ ID NO: 53672 - DNA, 15 bp, Homo sapiens
agggccccgcgacat

SEQ ID NO: 53673 - DNA, 15 bp, Homo sapiens
gggccccgcgacatc

SEQ ID NO: 53674 - DNA, 15 bp, Homo sapiens
ggccccgcgacatcg

SEQ ID NO: 53675 - DNA, 15 bp, Homo sapiens
gccccgcgacatcgc

SEQ ID NO: 53676 - DNA, 15 bp, Homo sapiens
ccccgcgacatcgcc

SEQ ID NO: 53677 - DNA, 15 bp, Homo sapiens
cccgcgacatcgccc

SEQ ID NO: 53678 - DNA, 15 bp, Homo sapiens
ccgcgacatcgccct

SEQ ID NO: 53679 - DNA, 15 bp, Homo sapiens
cgcgacatcgccctg

SEQ ID NO: 53680 - DNA, 15 bp, Homo sapiens
gcgacatcgccctgc

SEQ ID NO: 53681 - DNA, 15 bp, Homo sapiens
cgacatcgccctgcg

SEQ ID NO: 53682 - DNA, 15 bp, Homo sapiens
gacatcgccctgcga

SEQ ID NO: 53683 - DNA, 15 bp, Homo sapiens
acatcgccctgcgag

SEQ ID NO: 53684 - DNA, 15 bp, Homo sapiens
catcgccctgcgagt

SEQ ID NO: 53685 - DNA, 15 bp, Homo sapiens
atcgccctgcgagtc

SEQ ID NO: 53686 - DNA, 15 bp, Homo sapiens
tcgccctgcgagtcc

SEQ ID NO: 53687 - DNA, 15 bp, Homo sapiens
cgccctgcgagtcct

SEQ ID NO: 53688 - DNA, 15 bp, Homo sapiens
gccctgcgagtcctg

SEQ ID NO: 53689 - DNA, 15 bp, Homo sapiens
ccctgcgagtcctgc

SEQ ID NO: 53690 - DNA, 15 bp, Homo sapiens
cctgcgagtcctgcg

SEQ ID NO: 53691 - DNA, 15 bp, Homo sapiens
ctgcgagtcctgcgc

SEQ ID NO: 53692 - DNA, 15 bp, Homo sapiens
tgcgagtcctgcgcc

SEQ ID NO: 53693 - DNA, 15 bp, Homo sapiens
gcgagtcctgcgccc

SEQ ID NO: 53694 - DNA, 15 bp, Homo sapiens
cgagtcctgcgccct

SEQ ID NO: 53695 - DNA, 15 bp, Homo sapiens
gagtcctgcgccctc

SEQ ID NO: 53696 - DNA, 15 bp, Homo sapiens
agtcctgcgccctcc

SEQ ID NO: 53697 - DNA, 15 bp, Homo sapiens
gtcctgcgccctcct

SEQ ID NO: 53698 - DNA, 15 bp, Homo sapiens
tcctgcgccctcctg

SEQ ID NO: 53699 - DNA, 15 bp, Homo sapiens
cctgcgccctcctgg

SEQ ID NO: 53700 - DNA, 15 bp, Homo sapiens
ctgcgccctcctggg

SEQ ID NO: 53701 - DNA, 15 bp, Homo sapiens
tgcgccctcctgggg

SEQ ID NO: 53702 - DNA, 15 bp, Homo sapiens
gcgccctcctggggc

SEQ ID NO: 53703 - DNA, 15 bp, Homo sapiens
cgccctcctggggcg

SEQ ID NO: 53704 - DNA, 15 bp, Homo sapiens
gccctcctggggcgc

SEQ ID NO: 53705 - DNA, 15 bp, Homo sapiens
ccctcctggggcgcc

SEQ ID NO: 53706 - DNA, 15 bp, Homo sapiens
cctcctggggcgcct

SEQ ID NO: 53707 - DNA, 15 bp, Homo sapiens
ctcctggggcgcctt

SEQ ID NO: 53708 - DNA, 15 bp, Homo sapiens
tcctggggcgccttg

SEQ ID NO: 53709 - DNA, 15 bp, Homo sapiens
cctggggcgccttgg

SEQ ID NO: 53710 - DNA, 15 bp, Homo sapiens
ctggggcgccttgga

SEQ ID NO: 53711 - DNA, 15 bp, Homo sapiens
tggggcgccttggac

SEQ ID NO: 53712 - DNA, 15 bp, Homo sapiens
ggggcgccttggaca

SEQ ID NO: 53713 - DNA, 15 bp, Homo sapiens
gggcgccttggacag

SEQ ID NO: 53714 - DNA, 15 bp, Homo sapiens
ggcgccttggacagg

SEQ ID NO: 53715 - DNA, 15 bp, Homo sapiens
gcgccttggacagga

SEQ ID NO: 53716 - DNA, 15 bp, Homo sapiens
cgccttggacaggac

SEQ ID NO: 53717 - DNA, 15 bp, Homo sapiens
gccttggacaggacg

SEQ ID NO: 53718 - DNA, 15 bp, Homo sapiens
ccttggacaggacgc

SEQ ID NO: 53719 - DNA, 15 bp, Homo sapiens
cttggacaggacgcc

SEQ ID NO: 53720 - DNA, 15 bp, Homo sapiens
ttggacaggacgccc

SEQ ID NO: 53721 - DNA, 15 bp, Homo sapiens
tggacaggacgcccg

SEQ ID NO: 53722 - DNA, 15 bp, Homo sapiens
ggacaggacgcccgc

SEQ ID NO: 53723 - DNA, 15 bp, Homo sapiens
gacaggacgcccgcg

SEQ ID NO: 53724 - DNA, 15 bp, Homo sapiens
acaggacgcccgcgg

SEQ ID NO: 53725 - DNA, 15 bp, Homo sapiens
caggacgcccgcggc

SEQ ID NO: 53726 - DNA, 15 bp, Homo sapiens
aggacgcccgcggct

SEQ ID NO: 53727 - DNA, 15 bp, Homo sapiens
ggacgcccgcggctt

SEQ ID NO: 53728 - DNA, 15 bp, Homo sapiens
gacgcccgcggcttc

SEQ ID NO: 53729 - DNA, 15 bp, Homo sapiens
acgcccgcggcttcg

SEQ ID NO: 53730 - DNA, 15 bp, Homo sapiens
cgcccgcggcttcga

SEQ ID NO: 53731 - DNA, 15 bp, Homo sapiens
gcccgcggcttcgag

SEQ ID NO: 53732 - DNA, 15 bp, Homo sapiens
cccgcggcttcgagg

SEQ ID NO: 53733 - DNA, 15 bp, Homo sapiens
ccgcggcttcgaggg

SEQ ID NO: 53734 - DNA, 15 bp, Homo sapiens
cgcggcttcgagggg

SEQ ID NO: 53735 - DNA, 15 bp, Homo sapiens
gcggcttcgaggggt

SEQ ID NO: 53736 - DNA, 15 bp, Homo sapiens
cggcttcgaggggtg

SEQ ID NO: 53737 - DNA, 15 bp, Homo sapiens
ggcttcgaggggtgt

SEQ ID NO: 53738 - DNA, 15 bp, Homo sapiens
gcttcgaggggtgtt

SEQ ID NO: 53739 - DNA, 15 bp, Homo sapiens
cttcgaggggtgttc

SEQ ID NO: 53740 - DNA, 15 bp, Homo sapiens
ttcgaggggtgttcc

SEQ ID NO: 53741 - DNA, 15 bp, Homo sapiens
tcgaggggtgttcca

SEQ ID NO: 53742 - DNA, 15 bp, Homo sapiens
cgaggggtgttccag

SEQ ID NO: 53743 - DNA, 15 bp, Homo sapiens
gaggggtgttccagc

SEQ ID NO: 53744 - DNA, 15 bp, Homo sapiens
aggggtgttccagcc

SEQ ID NO: 53745 - DNA, 15 bp, Homo sapiens
ggggtgttccagccc

SEQ ID NO: 53746 - DNA, 15 bp, Homo sapiens
gggtgttccagcccc

SEQ ID NO: 53747 - DNA, 15 bp, Homo sapiens
ggtgttccagcccca

SEQ ID NO: 53748 - DNA, 15 bp, Homo sapiens
gtgttccagccccag

SEQ ID NO: 53749 - DNA, 15 bp, Homo sapiens
tgttccagccccagc

SEQ ID NO: 53750 - DNA, 15 bp, Homo sapiens
gttccagccccagcc

SEQ ID NO: 53751 - DNA, 15 bp, Homo sapiens
ttccagccccagcct

SEQ ID NO: 53752 - DNA, 15 bp, Homo sapiens
tccagccccagcctc

SEQ ID NO: 53753 - DNA, 15 bp, Homo sapiens
ccagccccagcctca

SEQ ID NO: 53754 - DNA, 15 bp, Homo sapiens
cagccccagcctcag

SEQ ID NO: 53755 - DNA, 15 bp, Homo sapiens
agccccagcctcagc

SEQ ID NO: 53756 - DNA, 15 bp, Homo sapiens
gccccagcctcagcc

SEQ ID NO: 53757 - DNA, 15 bp, Homo sapiens
ccccagcctcagccc

SEQ ID NO: 53758 - DNA, 15 bp, Homo sapiens
cccagcctcagcccc

SEQ ID NO: 53759 - DNA, 15 bp, Homo sapiens
ccagcctcagccccg

SEQ ID NO: 53760 - DNA, 15 bp, Homo sapiens
cagcctcagccccgg

SEQ ID NO: 53761 - DNA, 15 bp, Homo sapiens
agcctcagccccggg

SEQ ID NO: 53762 - DNA, 15 bp, Homo sapiens
gcctcagccccgggg

SEQ ID NO: 53763 - DNA, 15 bp, Homo sapiens
cctcagccccgggga

SEQ ID NO: 53764 - DNA, 15 bp, Homo sapiens
ctcagccccggggaa

SEQ ID NO: 53765 - DNA, 15 bp, Homo sapiens
tcagccccggggaac

SEQ ID NO: 53766 - DNA, 15 bp, Homo sapiens
cagccccggggaacc

SEQ ID NO: 53767 - DNA, 15 bp, Homo sapiens
agccccggggaaccc

SEQ ID NO: 53768 - DNA, 15 bp, Homo sapiens
gccccggggaacccc

SEQ ID NO: 53769 - DNA, 15 bp, Homo sapiens
ccccggggaaccccg

SEQ ID NO: 53770 - DNA, 15 bp, Homo sapiens
cccggggaaccccgc

SEQ ID NO: 53771 - DNA, 15 bp, Homo sapiens
ccggggaaccccgcg

SEQ ID NO: 53772 - DNA, 15 bp, Homo sapiens
cggggaaccccgcgt

SEQ ID NO: 53773 - DNA, 15 bp, Homo sapiens
ggggaaccccgcgtc

SEQ ID NO: 53774 - DNA, 15 bp, Homo sapiens
gggaaccccgcgtcc

SEQ ID NO: 53775 - DNA, 15 bp, Homo sapiens
ggaaccccgcgtccc

SEQ ID NO: 53776 - DNA, 15 bp, Homo sapiens
gaaccccgcgtcccg

SEQ ID NO: 53777 - DNA, 15 bp, Homo sapiens
aaccccgcgtcccgc

SEQ ID NO: 53778 - DNA, 15 bp, Homo sapiens
accccgcgtcccgcg

SEQ ID NO: 53779 - DNA, 15 bp, Homo sapiens
ccccgcgtcccgcgc

SEQ ID NO: 53780 - DNA, 15 bp, Homo sapiens
cccgcgtcccgcgcc

SEQ ID NO: 53781 - DNA, 15 bp, Homo sapiens
ccgcgtcccgcgccc

SEQ ID NO: 53782 - DNA, 15 bp, Homo sapiens
cgcgtcccgcgccct

SEQ ID NO: 53783 - DNA, 15 bp, Homo sapiens
gcgtcccgcgccctc

SEQ ID NO: 53784 - DNA, 15 bp, Homo sapiens
cgtcccgcgccctct

SEQ ID NO: 53785 - DNA, 15 bp, Homo sapiens
gtcccgcgccctctg

SEQ ID NO: 53786 - DNA, 15 bp, Homo sapiens
tcccgcgccctctgc

SEQ ID NO: 53787 - DNA, 15 bp, Homo sapiens
cccgcgccctctgca

SEQ ID NO: 53788 - DNA, 15 bp, Homo sapiens
ccgcgccctctgcag

SEQ ID NO: 53789 - DNA, 15 bp, Homo sapiens
cgcgccctctgcaga

SEQ ID NO: 53790 - DNA, 15 bp, Homo sapiens
gcgccctctgcagaa

SEQ ID NO: 53791 - DNA, 15 bp, Homo sapiens
cgccctctgcagaaa

SEQ ID NO: 53792 - DNA, 15 bp, Homo sapiens
gccctctgcagaaac

SEQ ID NO: 53793 - DNA, 15 bp, Homo sapiens
ccctctgcagaaacc

SEQ ID NO: 53794 - DNA, 15 bp, Homo sapiens
cctctgcagaaaccc

SEQ ID NO: 53795 - DNA, 15 bp, Homo sapiens
ctctgcagaaacccc

SEQ ID NO: 53796 - DNA, 15 bp, Homo sapiens
tctgcagaaaccccg

SEQ ID NO: 53797 - DNA, 15 bp, Homo sapiens
ctgcagaaaccccgg

SEQ ID NO: 53798 - DNA, 15 bp, Homo sapiens
tgcagaaaccccggc

SEQ ID NO: 53799 - DNA, 15 bp, Homo sapiens
gcagaaaccccggct

SEQ ID NO: 53800 - DNA, 15 bp, Homo sapiens
cagaaaccccggctg

SEQ ID NO: 53801 - DNA, 15 bp, Homo sapiens
agaaaccccggctgt

SEQ ID NO: 53802 - DNA, 15 bp, Homo sapiens
gaaaccccggctgtg

SEQ ID NO: 53803 - DNA, 15 bp, Homo sapiens
aaaccccggctgtgg

SEQ ID NO: 53804 - DNA, 15 bp, Homo sapiens
aaccccggctgtggg

SEQ ID NO: 53805 - DNA, 15 bp, Homo sapiens
accccggctgtgggc

SEQ ID NO: 53806 - DNA, 15 bp, Homo sapiens
ccccggctgtgggcg

SEQ ID NO: 53807 - DNA, 15 bp, Homo sapiens
cccggctgtgggcgc

SEQ ID NO: 53808 - DNA, 15 bp, Homo sapiens
ccggctgtgggcgct

SEQ ID NO: 53809 - DNA, 15 bp, Homo sapiens
cggctgtgggcgctg

SEQ ID NO: 53810 - DNA, 15 bp, Homo sapiens
ggctgtgggcgctgg

SEQ ID NO: 53811 - DNA, 15 bp, Homo sapiens
gctgtgggcgctggg

SEQ ID NO: 53812 - DNA, 15 bp, Homo sapiens
ctgtgggcgctgggg

SEQ ID NO: 53813 - DNA, 15 bp, Homo sapiens
tgtgggcgctggggc

SEQ ID NO: 53814 - DNA, 15 bp, Homo sapiens
gtgggcgctggggcg

SEQ ID NO: 53815 - DNA, 15 bp, Homo sapiens
tgggcgctggggcgg

SEQ ID NO: 53816 - DNA, 15 bp, Homo sapiens
gggcgctggggcggg

SEQ ID NO: 53817 - DNA, 15 bp, Homo sapiens
ggcgctggggcggga

SEQ ID NO: 53818 - DNA, 15 bp, Homo sapiens
gcgctggggcgggag

SEQ ID NO: 53819 - DNA, 15 bp, Homo sapiens
cgctggggcgggagg

SEQ ID NO: 53820 - DNA, 15 bp, Homo sapiens
gctggggcgggaggg

SEQ ID NO: 53821 - DNA, 15 bp, Homo sapiens
ctggggcgggaggga

SEQ ID NO: 53822 - DNA, 15 bp, Homo sapiens
tggggcgggagggag

SEQ ID NO: 53823 - DNA, 15 bp, Homo sapiens
ggggcgggagggagc

SEQ ID NO: 53824 - DNA, 15 bp, Homo sapiens
gggcgggagggagcg

SEQ ID NO: 53825 - DNA, 15 bp, Homo sapiens
ggcgggagggagcga

SEQ ID NO: 53826 - DNA, 15 bp, Homo sapiens
gcgggagggagcgag

SEQ ID NO: 53827 - DNA, 15 bp, Homo sapiens
cgggagggagcgagt

SEQ ID NO: 53828 - DNA, 15 bp, Homo sapiens
gggagggagcgagtg

SEQ ID NO: 53829 - DNA, 15 bp, Homo sapiens
ggagggagcgagtga

SEQ ID NO: 53830 - DNA, 15 bp, Homo sapiens
gagggagcgagtgag

SEQ ID NO: 53831 - DNA, 15 bp, Homo sapiens
agggagcgagtgaga

SEQ ID NO: 53832 - DNA, 15 bp, Homo sapiens
gggagcgagtgagaa

SEQ ID NO: 53833 - DNA, 15 bp, Homo sapiens
ggagcgagtgagaat

SEQ ID NO: 53834 - DNA, 15 bp, Homo sapiens
gagcgagtgagaatc

SEQ ID NO: 53835 - DNA, 15 bp, Homo sapiens
agcgagtgagaatcg

SEQ ID NO: 53836 - DNA, 15 bp, Homo sapiens
gcgagtgagaatcgc

SEQ ID NO: 53837 - DNA, 15 bp, Homo sapiens
cgagtgagaatcgca

SEQ ID NO: 53838 - DNA, 15 bp, Homo sapiens
gagtgagaatcgcac

SEQ ID NO: 53839 - DNA, 15 bp, Homo sapiens
agtgagaatcgcacg

SEQ ID NO: 53840 - DNA, 15 bp, Homo sapiens
gtgagaatcgcacgc

SEQ ID NO: 53841 - DNA, 15 bp, Homo sapiens
tgagaatcgcacgcc

SEQ ID NO: 53842 - DNA, 15 bp, Homo sapiens
gagaatcgcacgccc

SEQ ID NO: 53843 - DNA, 15 bp, Homo sapiens
agaatcgcacgcccc

SEQ ID NO: 53844 - DNA, 15 bp, Homo sapiens
gaatcgcacgccccg

SEQ ID NO: 53845 - DNA, 15 bp, Homo sapiens
aatcgcacgccccga

SEQ ID NO: 53846 - DNA, 15 bp, Homo sapiens
atcgcacgccccgag

SEQ ID NO: 53847 - DNA, 15 bp, Homo sapiens
tcgcacgccccgagg

SEQ ID NO: 53848 - DNA, 15 bp, Homo sapiens
cgcacgccccgaggt

SEQ ID NO: 53849 - DNA, 15 bp, Homo sapiens
gcacgccccgaggtc

SEQ ID NO: 53850 - DNA, 15 bp, Homo sapiens
cacgccccgaggtct

SEQ ID NO: 53851 - DNA, 15 bp, Homo sapiens
acgccccgaggtctc

SEQ ID NO: 53852 - DNA, 15 bp, Homo sapiens
cgccccgaggtctcg

SEQ ID NO: 53853 - DNA, 15 bp, Homo sapiens
gccccgaggtctcgc

SEQ ID NO: 53854 - DNA, 15 bp, Homo sapiens
ccccgaggtctcgct

SEQ ID NO: 53855 - DNA, 15 bp, Homo sapiens
cccgaggtctcgctc

SEQ ID NO: 53856 - DNA, 15 bp, Homo sapiens
ccgaggtctcgctcc

SEQ ID NO: 53857 - DNA, 15 bp, Homo sapiens
cgaggtctcgctccc

SEQ ID NO: 53858 - DNA, 15 bp, Homo sapiens
gaggtctcgctcccc

SEQ ID NO: 53859 - DNA, 15 bp, Homo sapiens
aggtctcgctcccct

SEQ ID NO: 53860 - DNA, 15 bp, Homo sapiens
ggtctcgctccccta

SEQ ID NO: 53861 - DNA, 15 bp, Homo sapiens
gtctcgctcccctag

SEQ ID NO: 53862 - DNA, 15 bp, Homo sapiens
tctcgctcccctagc

SEQ ID NO: 53863 - DNA, 15 bp, Homo sapiens
ctcgctcccctagct

SEQ ID NO: 53864 - DNA, 15 bp, Homo sapiens
tcgctcccctagctt

SEQ ID NO: 53865 - DNA, 15 bp, Homo sapiens
cgctcccctagcttt

SEQ ID NO: 53866 - DNA, 15 bp, Homo sapiens
gctcccctagctttc

SEQ ID NO: 53867 - DNA, 15 bp, Homo sapiens
ctcccctagctttca

SEQ ID NO: 53868 - DNA, 15 bp, Homo sapiens
tcccctagctttcaa

SEQ ID NO: 53869 - DNA, 15 bp, Homo sapiens
cccctagctttcaac

SEQ ID NO: 53870 - DNA, 15 bp, Homo sapiens
ccctagctttcaact

SEQ ID NO: 53871 - DNA, 15 bp, Homo sapiens
cctagctttcaactc

SEQ ID NO: 53872 - DNA, 15 bp, Homo sapiens
ctagctttcaactct

SEQ ID NO: 53873 - DNA, 15 bp, Homo sapiens
tagctttcaactctc

SEQ ID NO: 53874 - DNA, 15 bp, Homo sapiens
agctttcaactctcc

SEQ ID NO: 53875 - DNA, 15 bp, Homo sapiens
gctttcaactctccc

SEQ ID NO: 53876 - DNA, 15 bp, Homo sapiens
ctttcaactctcccc

SEQ ID NO: 53877 - DNA, 15 bp, Homo sapiens
tttcaactctcccct

SEQ ID NO: 53878 - DNA, 15 bp, Homo sapiens
ttcaactctcccctt

SEQ ID NO: 53879 - DNA, 15 bp, Homo sapiens
tcaactctccccttc

SEQ ID NO: 53880 - DNA, 15 bp, Homo sapiens
caactctccccttcc

SEQ ID NO: 53881 - DNA, 15 bp, Homo sapiens
aactctccccttcct

SEQ ID NO: 53882 - DNA, 15 bp, Homo sapiens
actctccccttcctc

SEQ ID NO: 53883 - DNA, 15 bp, Homo sapiens
ctctccccttcctcc

SEQ ID NO: 53884 - DNA, 15 bp, Homo sapiens
tctccccttcctccc

SEQ ID NO: 53885 - DNA, 15 bp, Homo sapiens
ctccccttcctcccc

SEQ ID NO: 53886 - DNA, 15 bp, Homo sapiens
tccccttcctcccca

SEQ ID NO: 53887 - DNA, 15 bp, Homo sapiens
ccccttcctccccat

SEQ ID NO: 53888 - DNA, 15 bp, Homo sapiens
cccttcctccccatc

SEQ ID NO: 53889 - DNA, 15 bp, Homo sapiens
ccttcctccccatcc

SEQ ID NO: 53890 - DNA, 15 bp, Homo sapiens
cttcctccccatccc

SEQ ID NO: 53891 - DNA, 15 bp, Homo sapiens
ttcctccccatccca

SEQ ID NO: 53892 - DNA, 15 bp, Homo sapiens
tcctccccatcccag

SEQ ID NO: 53893 - DNA, 15 bp, Homo sapiens
cctccccatcccagc

SEQ ID NO: 53894 - DNA, 15 bp, Homo sapiens
ctccccatcccagca

SEQ ID NO: 53895 - DNA, 15 bp, Homo sapiens
tccccatcccagcac

SEQ ID NO: 53896 - DNA, 15 bp, Homo sapiens
ccccatcccagcacc

SEQ ID NO: 53897 - DNA, 15 bp, Homo sapiens
cccatcccagcaccc

SEQ ID NO: 53898 - DNA, 15 bp, Homo sapiens
ccatcccagcaccca

SEQ ID NO: 53899 - DNA, 15 bp, Homo sapiens
catcccagcacccaa

SEQ ID NO: 53900 - DNA, 15 bp, Homo sapiens
atcccagcacccaag

SEQ ID NO: 53901 - DNA, 15 bp, Homo sapiens
tcccagcacccaagt

SEQ ID NO: 53902 - DNA, 15 bp, Homo sapiens
cccagcacccaagtt

SEQ ID NO: 53903 - DNA, 15 bp, Homo sapiens
ccagcacccaagttc

SEQ ID NO: 53904 - DNA, 15 bp, Homo sapiens
cagcacccaagttct

SEQ ID NO: 53905 - DNA, 15 bp, Homo sapiens
agcacccaagttctc

SEQ ID NO: 53906 - DNA, 15 bp, Homo sapiens
gcacccaagttctct

SEQ ID NO: 53907 - DNA, 15 bp, Homo sapiens
cacccaagttctctg

SEQ ID NO: 53908 - DNA, 15 bp, Homo sapiens
acccaagttctctgg

SEQ ID NO: 53909 - DNA, 15 bp, Homo sapiens
cccaagttctctggg

SEQ ID NO: 53910 - DNA, 15 bp, Homo sapiens
ccaagttctctggga

SEQ ID NO: 53911 - DNA, 15 bp, Homo sapiens
caagttctctgggag

SEQ ID NO: 53912 - DNA, 15 bp, Homo sapiens
aagttctctgggaga

SEQ ID NO: 53913 - DNA, 15 bp, Homo sapiens
agttctctgggagag

SEQ ID NO: 53914 - DNA, 15 bp, Homo sapiens
gttctctgggagagg

SEQ ID NO: 53915 - DNA, 15 bp, Homo sapiens
ttctctgggagaggg

SEQ ID NO: 53916 - DNA, 15 bp, Homo sapiens
tctctgggagagggc

SEQ ID NO: 53917 - DNA, 15 bp, Homo sapiens
ctctgggagagggcg

SEQ ID NO: 53918 - DNA, 15 bp, Homo sapiens
tctgggagagggcgt

SEQ ID NO: 53919 - DNA, 15 bp, Homo sapiens
ctgggagagggcgtg

SEQ ID NO: 53920 - DNA, 15 bp, Homo sapiens
tgggagagggcgtgc

SEQ ID NO: 53921 - DNA, 15 bp, Homo sapiens
gggagagggcgtgcg

SEQ ID NO: 53922 - DNA, 15 bp, Homo sapiens
ggagagggcgtgcgt

SEQ ID NO: 53923 - DNA, 15 bp, Homo sapiens
gagagggcgtgcgtt

SEQ ID NO: 53924 - DNA, 15 bp, Homo sapiens
agagggcgtgcgttt

SEQ ID NO: 53925 - DNA, 15 bp, Homo sapiens
gagggcgtgcgtttc

SEQ ID NO: 53926 - DNA, 15 bp, Homo sapiens
agggcgtgcgtttcc

SEQ ID NO: 53927 - DNA, 15 bp, Homo sapiens
gggcgtgcgtttccc

SEQ ID NO: 53928 - DNA, 15 bp, Homo sapiens
ggcgtgcgtttcccg

SEQ ID NO: 53929 - DNA, 15 bp, Homo sapiens
gcgtgcgtttcccgg

SEQ ID NO: 53930 - DNA, 15 bp, Homo sapiens
cgtgcgtttcccggg

SEQ ID NO: 53931 - DNA, 15 bp, Homo sapiens
gtgcgtttcccgggc

SEQ ID NO: 53932 - DNA, 15 bp, Homo sapiens
tgcgtttcccgggcc

SEQ ID NO: 53933 - DNA, 15 bp, Homo sapiens
gcgtttcccgggcca

SEQ ID NO: 53934 - DNA, 15 bp, Homo sapiens
cgtttcccgggccac

SEQ ID NO: 53935 - DNA, 15 bp, Homo sapiens
gtttcccgggccaca

SEQ ID NO: 53936 - DNA, 15 bp, Homo sapiens
tttcccgggccacag

SEQ ID NO: 53937 - DNA, 15 bp, Homo sapiens
ttcccgggccacaga

SEQ ID NO: 53938 - DNA, 15 bp, Homo sapiens
tcccgggccacagac

SEQ ID NO: 53939 - DNA, 15 bp, Homo sapiens
cccgggccacagaca

SEQ ID NO: 53940 - DNA, 15 bp, Homo sapiens
ccgggccacagacac

SEQ ID NO: 53941 - DNA, 15 bp, Homo sapiens
cgggccacagacaca

SEQ ID NO: 53942 - DNA, 15 bp, Homo sapiens
gggccacagacacac

SEQ ID NO: 53943 - DNA, 15 bp, Homo sapiens
ggccacagacacacc

SEQ ID NO: 53944 - DNA, 15 bp, Homo sapiens
gccacagacacacct

SEQ ID NO: 53945 - DNA, 15 bp, Homo sapiens
ccacagacacacctt

SEQ ID NO: 53946 - DNA, 15 bp, Homo sapiens
cacagacacaccttc

SEQ ID NO: 53947 - DNA, 15 bp, Homo sapiens
acagacacaccttcc

SEQ ID NO: 53948 - DNA, 15 bp, Homo sapiens
cagacacaccttccc

SEQ ID NO: 53949 - DNA, 15 bp, Homo sapiens
agacacaccttcccg

SEQ ID NO: 53950 - DNA, 15 bp, Homo sapiens
gacacaccttcccgc

SEQ ID NO: 53951 - DNA, 15 bp, Homo sapiens
acacaccttcccgca

SEQ ID NO: 53952 - DNA, 15 bp, Homo sapiens
cacaccttcccgcac

SEQ ID NO: 53953 - DNA, 15 bp, Homo sapiens
acaccttcccgcacc

SEQ ID NO: 53954 - DNA, 15 bp, Homo sapiens
caccttcccgcacct

SEQ ID NO: 53955 - DNA, 15 bp, Homo sapiens
accttcccgcacctt

SEQ ID NO: 53956 - DNA, 15 bp, Homo sapiens
ccttcccgcaccttc

SEQ ID NO: 53957 - DNA, 15 bp, Homo sapiens
cttcccgcaccttcc

SEQ ID NO: 53958 - DNA, 15 bp, Homo sapiens
ttcccgcaccttcct

SEQ ID NO: 53959 - DNA, 15 bp, Homo sapiens
tcccgcaccttcctg

SEQ ID NO: 53960 - DNA, 15 bp, Homo sapiens
cccgcaccttcctgc

SEQ ID NO: 53961 - DNA, 15 bp, Homo sapiens
ccgcaccttcctgca

SEQ ID NO: 53962 - DNA, 15 bp, Homo sapiens
cgcaccttcctgcac

SEQ ID NO: 53963 - DNA, 15 bp, Homo sapiens
gcaccttcctgcact

SEQ ID NO: 53964 - DNA, 15 bp, Homo sapiens
caccttcctgcacta

SEQ ID NO: 53965 - DNA, 15 bp, Homo sapiens
accttcctgcactac

SEQ ID NO: 53966 - DNA, 15 bp, Homo sapiens
ccttcctgcactacg

SEQ ID NO: 53967 - DNA, 15 bp, Homo sapiens
cttcctgcactacgg

SEQ ID NO: 53968 - DNA, 15 bp, Homo sapiens
ttcctgcactacgga

SEQ ID NO: 53969 - DNA, 15 bp, Homo sapiens
tcctgcactacggag

SEQ ID NO: 53970 - DNA, 15 bp, Homo sapiens
cctgcactacggagc

SEQ ID NO: 53971 - DNA, 15 bp, Homo sapiens
ctgcactacggagct

SEQ ID NO: 53972 - DNA, 15 bp, Homo sapiens
tgcactacggagctt

SEQ ID NO: 53973 - DNA, 15 bp, Homo sapiens
gcactacggagcttg

SEQ ID NO: 53974 - DNA, 15 bp, Homo sapiens
cactacggagcttgc

SEQ ID NO: 53975 - DNA, 15 bp, Homo sapiens
actacggagcttgcg

SEQ ID NO: 53976 - DNA, 15 bp, Homo sapiens
ctacggagcttgcga

SEQ ID NO: 53977 - DNA, 15 bp, Homo sapiens
tacggagcttgcgaa

SEQ ID NO: 53978 - DNA, 15 bp, Homo sapiens
acggagcttgcgaac

SEQ ID NO: 53979 - DNA, 15 bp, Homo sapiens
cggagcttgcgaacg

SEQ ID NO: 53980 - DNA, 15 bp, Homo sapiens
ggagcttgcgaacgc

SEQ ID NO: 53981 - DNA, 15 bp, Homo sapiens
gagcttgcgaacgcg

SEQ ID NO: 53982 - DNA, 15 bp, Homo sapiens
agcttgcgaacgcga

SEQ ID NO: 53983 - DNA, 15 bp, Homo sapiens
gcttgcgaacgcgag

SEQ ID NO: 53984 - DNA, 15 bp, Homo sapiens
cttgcgaacgcgagc

SEQ ID NO: 53985 - DNA, 15 bp, Homo sapiens
ttgcgaacgcgagca

SEQ ID NO: 53986 - DNA, 15 bp, Homo sapiens
tgcgaacgcgagcac

SEQ ID NO: 53987 - DNA, 15 bp, Homo sapiens
gcgaacgcgagcaca

SEQ ID NO: 53988 - DNA, 15 bp, Homo sapiens
cgaacgcgagcacac

SEQ ID NO: 53989 - DNA, 15 bp, Homo sapiens
gaacgcgagcacaca

SEQ ID NO: 53990 - DNA, 15 bp, Homo sapiens
aacgcgagcacacaa

SEQ ID NO: 53991 - DNA, 15 bp, Homo sapiens
acgcgagcacacaat

SEQ ID NO: 53992 - DNA, 15 bp, Homo sapiens
cgcgagcacacaatg

SEQ ID NO: 53993 - DNA, 15 bp, Homo sapiens
gcgagcacacaatga

SEQ ID NO: 53994 - DNA, 15 bp, Homo sapiens
cgagcacacaatgaa

SEQ ID NO: 53995 - DNA, 15 bp, Homo sapiens
gagcacacaatgaaa

SEQ ID NO: 53996 - DNA, 15 bp, Homo sapiens
agcacacaatgaaat

SEQ ID NO: 53997 - DNA, 15 bp, Homo sapiens
gcacacaatgaaatc

SEQ ID NO: 53998 - DNA, 15 bp, Homo sapiens
cacacaatgaaatcg

SEQ ID NO: 53999 - DNA, 15 bp, Homo sapiens
acacaatgaaatcgc

SEQ ID NO: 54000 - DNA, 15 bp, Homo sapiens
cacaatgaaatcgca

SEQ ID NO: 54001 - DNA, 15 bp, Homo sapiens
acaatgaaatcgcac

SEQ ID NO: 54002 - DNA, 15 bp, Homo sapiens
caatgaaatcgcaca

SEQ ID NO: 54003 - DNA, 15 bp, Homo sapiens
aatgaaatcgcacag

SEQ ID NO: 54004 - DNA, 15 bp, Homo sapiens
atgaaatcgcacaga

SEQ ID NO: 54005 - DNA, 15 bp, Homo sapiens
tgaaatcgcacagag

SEQ ID NO: 54006 - DNA, 15 bp, Homo sapiens
gaaatcgcacagagc

SEQ ID NO: 54007 - DNA, 15 bp, Homo sapiens
aaatcgcacagagca

SEQ ID NO: 54008 - DNA, 15 bp, Homo sapiens
aatcgcacagagcat

SEQ ID NO: 54009 - DNA, 15 bp, Homo sapiens
atcgcacagagcatg

SEQ ID NO: 54010 - DNA, 15 bp, Homo sapiens
tcgcacagagcatgg

SEQ ID NO: 54011 - DNA, 15 bp, Homo sapiens
cgcacagagcatggg

SEQ ID NO: 54012 - DNA, 15 bp, Homo sapiens
gcacagagcatgggg

SEQ ID NO: 54013 - DNA, 15 bp, Homo sapiens
cacagagcatggggg

SEQ ID NO: 54014 - DNA, 15 bp, Homo sapiens
acagagcatgggggc

SEQ ID NO: 54015 - DNA, 15 bp, Homo sapiens
cagagcatgggggct

SEQ ID NO: 54016 - DNA, 15 bp, Homo sapiens
agagcatgggggcta

SEQ ID NO: 54017 - DNA, 15 bp, Homo sapiens
gagcatgggggctat

SEQ ID NO: 54018 - DNA, 15 bp, Homo sapiens
agcatgggggctatt

SEQ ID NO: 54019 - DNA, 15 bp, Homo sapiens
gcatgggggctattg

SEQ ID NO: 54020 - DNA, 15 bp, Homo sapiens
catgggggctattgg

SEQ ID NO: 54021 - DNA, 15 bp, Homo sapiens
atgggggctattggt

SEQ ID NO: 54022 - DNA, 15 bp, Homo sapiens
tgggggctattggtt

SEQ ID NO: 54023 - DNA, 15 bp, Homo sapiens
gggggctattggttt

SEQ ID NO: 54024 - DNA, 15 bp, Homo sapiens
ggggctattggttta

SEQ ID NO: 54025 - DNA, 15 bp, Homo sapiens
gggctattggtttac

SEQ ID NO: 54026 - DNA, 15 bp, Homo sapiens
ggctattggtttact

SEQ ID NO: 54027 - DNA, 15 bp, Homo sapiens
gctattggtttactc

SEQ ID NO: 54028 - DNA, 15 bp, Homo sapiens
ctattggtttactct

SEQ ID NO: 54029 - DNA, 15 bp, Homo sapiens
tattggtttactctg

SEQ ID NO: 54030 - DNA, 15 bp, Homo sapiens
attggtttactctgc

SEQ ID NO: 54031 - DNA, 15 bp, Homo sapiens
ttggtttactctgct

SEQ ID NO: 54032 - DNA, 15 bp, Homo sapiens
tggtttactctgctg

SEQ ID NO: 54033 - DNA, 15 bp, Homo sapiens
ggtttactctgctgc

SEQ ID NO: 54034 - DNA, 15 bp, Homo sapiens
gtttactctgctgcc

SEQ ID NO: 54035 - DNA, 15 bp, Homo sapiens
tttactctgctgcct

SEQ ID NO: 54036 - DNA, 15 bp, Homo sapiens
ttactctgctgcctt

SEQ ID NO: 54037 - DNA, 15 bp, Homo sapiens
tactctgctgcctta

SEQ ID NO: 54038 - DNA, 15 bp, Homo sapiens
actctgctgccttaa

SEQ ID NO: 54039 - DNA, 15 bp, Homo sapiens
ctctgctgccttaaa

SEQ ID NO: 54040 - DNA, 15 bp, Homo sapiens
tctgctgccttaaac

SEQ ID NO: 54041 - DNA, 15 bp, Homo sapiens
ctgctgccttaaaca

SEQ ID NO: 54042 - DNA, 15 bp, Homo sapiens
tgctgccttaaacac

SEQ ID NO: 54043 - DNA, 15 bp, Homo sapiens
gctgccttaaacacg

SEQ ID NO: 54044 - DNA, 15 bp, Homo sapiens
ctgccttaaacacgc

SEQ ID NO: 54045 - DNA, 15 bp, Homo sapiens
tgccttaaacacgcc

SEQ ID NO: 54046 - DNA, 15 bp, Homo sapiens
gccttaaacacgccg

SEQ ID NO: 54047 - DNA, 15 bp, Homo sapiens
ccttaaacacgccgg

SEQ ID NO: 54048 - DNA, 15 bp, Homo sapiens
cttaaacacgccggc

SEQ ID NO: 54049 - DNA, 15 bp, Homo sapiens
ttaaacacgccggct

SEQ ID NO: 54050 - DNA, 15 bp, Homo sapiens
taaacacgccggctt

SEQ ID NO: 54051 - DNA, 15 bp, Homo sapiens
aaacacgccggctta

SEQ ID NO: 54052 - DNA, 15 bp, Homo sapiens
aacacgccggcttaa

SEQ ID NO: 54053 - DNA, 15 bp, Homo sapiens
acacgccggcttaaa

SEQ ID NO: 54054 - DNA, 15 bp, Homo sapiens
cacgccggcttaaac

SEQ ID NO: 54055 - DNA, 15 bp, Homo sapiens
acgccggcttaaaca

SEQ ID NO: 54056 - DNA, 15 bp, Homo sapiens
cgccggcttaaacag

SEQ ID NO: 54057 - DNA, 15 bp, Homo sapiens
gccggcttaaacaga

SEQ ID NO: 54058 - DNA, 15 bp, Homo sapiens
ccggcttaaacagag

SEQ ID NO: 54059 - DNA, 15 bp, Homo sapiens
cggcttaaacagagt

SEQ ID NO: 54060 - DNA, 15 bp, Homo sapiens
ggcttaaacagagtt

SEQ ID NO: 54061 - DNA, 15 bp, Homo sapiens
gcttaaacagagttc

SEQ ID NO: 54062 - DNA, 15 bp, Homo sapiens
cttaaacagagttcg

SEQ ID NO: 54063 - DNA, 15 bp, Homo sapiens
ttaaacagagttcgc

SEQ ID NO: 54064 - DNA, 15 bp, Homo sapiens
taaacagagttcgcg

SEQ ID NO: 54065 - DNA, 15 bp, Homo sapiens
aaacagagttcgcgc

SEQ ID NO: 54066 - DNA, 15 bp, Homo sapiens
aacagagttcgcgca

SEQ ID NO: 54067 - DNA, 15 bp, Homo sapiens
acagagttcgcgcac

SEQ ID NO: 54068 - DNA, 15 bp, Homo sapiens
cagagttcgcgcact

SEQ ID NO: 54069 - DNA, 15 bp, Homo sapiens
agagttcgcgcactg

SEQ ID NO: 54070 - DNA, 15 bp, Homo sapiens
gagttcgcgcactga

SEQ ID NO: 54071 - DNA, 15 bp, Homo sapiens
agttcgcgcactgac

SEQ ID NO: 54072 - DNA, 15 bp, Homo sapiens
gttcgcgcactgacc

SEQ ID NO: 54073 - DNA, 15 bp, Homo sapiens
ttcgcgcactgacct

SEQ ID NO: 54074 - DNA, 15 bp, Homo sapiens
tcgcgcactgacctc

SEQ ID NO: 54075 - DNA, 15 bp, Homo sapiens
cgcgcactgacctct

SEQ ID NO: 54076 - DNA, 15 bp, Homo sapiens
gcgcactgacctctc

SEQ ID NO: 54077 - DNA, 15 bp, Homo sapiens
cgcactgacctctct

SEQ ID NO: 54078 - DNA, 15 bp, Homo sapiens
gcactgacctctcta

SEQ ID NO: 54079 - DNA, 15 bp, Homo sapiens
cactgacctctctag

SEQ ID NO: 54080 - DNA, 15 bp, Homo sapiens
actgacctctctaga

SEQ ID NO: 54081 - DNA, 15 bp, Homo sapiens
ctgacctctctagag

SEQ ID NO: 54082 - DNA, 15 bp, Homo sapiens
tgacctctctagagt

SEQ ID NO: 54083 - DNA, 15 bp, Homo sapiens
gacctctctagagtt

SEQ ID NO: 54084 - DNA, 15 bp, Homo sapiens
acctctctagagttt

SEQ ID NO: 54085 - DNA, 15 bp, Homo sapiens
cctctctagagtttg

SEQ ID NO: 54086 - DNA, 15 bp, Homo sapiens
ctctctagagtttgc

SEQ ID NO: 54087 - DNA, 15 bp, Homo sapiens
tctctagagtttgcc

SEQ ID NO: 54088 - DNA, 15 bp, Homo sapiens
ctctagagtttgcct

SEQ ID NO: 54089 - DNA, 15 bp, Homo sapiens
tctagagtttgccta

SEQ ID NO: 54090 - DNA, 15 bp, Homo sapiens
ctagagtttgcctaa

SEQ ID NO: 54091 - DNA, 15 bp, Homo sapiens
tagagtttgcctaat

SEQ ID NO: 54092 - DNA, 15 bp, Homo sapiens
agagtttgcctaata

SEQ ID NO: 54093 - DNA, 15 bp, Homo sapiens
gagtttgcctaatag

SEQ ID NO: 54094 - DNA, 15 bp, Homo sapiens
agtttgcctaatagg

SEQ ID NO: 54095 - DNA, 15 bp, Homo sapiens
gtttgcctaatagga

SEQ ID NO: 54096 - DNA, 15 bp, Homo sapiens
tttgcctaataggaa

SEQ ID NO: 54097 - DNA, 15 bp, Homo sapiens
ttgcctaataggaat

SEQ ID NO: 54098 - DNA, 15 bp, Homo sapiens
tgcctaataggaatt

SEQ ID NO: 54099 - DNA, 15 bp, Homo sapiens
gcctaataggaattc

SEQ ID NO: 54100 - DNA, 15 bp, Homo sapiens
cctaataggaattca

SEQ ID NO: 54101 - DNA, 15 bp, Homo sapiens
ctaataggaattcaa

SEQ ID NO: 54102 - DNA, 15 bp, Homo sapiens
taataggaattcaat

SEQ ID NO: 54103 - DNA, 15 bp, Homo sapiens
aataggaattcaatc

SEQ ID NO: 54104 - DNA, 15 bp, Homo sapiens
ataggaattcaatca

SEQ ID NO: 54105 - DNA, 15 bp, Homo sapiens
taggaattcaatcaa

SEQ ID NO: 54106 - DNA, 15 bp, Homo sapiens
aggaattcaatcaag

SEQ ID NO: 54107 - DNA, 15 bp, Homo sapiens
ggaattcaatcaaga

SEQ ID NO: 54108 - DNA, 15 bp, Homo sapiens
gaattcaatcaagat

SEQ ID NO: 54109 - DNA, 15 bp, Homo sapiens
aattcaatcaagata

SEQ ID NO: 54110 - DNA, 15 bp, Homo sapiens
attcaatcaagataa

SEQ ID NO: 54111 - DNA, 15 bp, Homo sapiens
ttcaatcaagataat

SEQ ID NO: 54112 - DNA, 15 bp, Homo sapiens
tcaatcaagataata

SEQ ID NO: 54113 - DNA, 15 bp, Homo sapiens
caatcaagataataa

SEQ ID NO: 54114 - DNA, 15 bp, Homo sapiens
aatcaagataataac

SEQ ID NO: 54115 - DNA, 15 bp, Homo sapiens
atcaagataataaca

SEQ ID NO: 54116 - DNA, 15 bp, Homo sapiens
tcaagataataacag

SEQ ID NO: 54117 - DNA, 15 bp, Homo sapiens
caagataataacagc

SEQ ID NO: 54118 - DNA, 15 bp, Homo sapiens
aagataataacagca

SEQ ID NO: 54119 - DNA, 15 bp, Homo sapiens
agataataacagcat

SEQ ID NO: 54120 - DNA, 15 bp, Homo sapiens
gataataacagcatt

SEQ ID NO: 54121 - DNA, 15 bp, Homo sapiens
ataataacagcattt

SEQ ID NO: 54122 - DNA, 15 bp, Homo sapiens
taataacagcatttt

SEQ ID NO: 54123 - DNA, 15 bp, Homo sapiens
aataacagcattttt

SEQ ID NO: 54124 - DNA, 15 bp, Homo sapiens
ataacagcatttttt

SEQ ID NO: 54125 - DNA, 15 bp, Homo sapiens
taacagcatttttta

SEQ ID NO: 54126 - DNA, 15 bp, Homo sapiens
aacagcattttttat

SEQ ID NO: 54127 - DNA, 15 bp, Homo sapiens
acagcattttttatt

SEQ ID NO: 54128 - DNA, 15 bp, Homo sapiens
cagcattttttattg

SEQ ID NO: 54129 - DNA, 15 bp, Homo sapiens
agcattttttattga

SEQ ID NO: 54130 - DNA, 15 bp, Homo sapiens
gcattttttattgat

SEQ ID NO: 54131 - DNA, 15 bp, Homo sapiens
cattttttattgatg

SEQ ID NO: 54132 - DNA, 15 bp, Homo sapiens
attttttattgatga

SEQ ID NO: 54133 - DNA, 15 bp, Homo sapiens
ttttttattgatgaa

SEQ ID NO: 54134 - DNA, 15 bp, Homo sapiens
tttttattgatgaac

SEQ ID NO: 54135 - DNA, 15 bp, Homo sapiens
ttttattgatgaacg

SEQ ID NO: 54136 - DNA, 15 bp, Homo sapiens
tttattgatgaacgc

SEQ ID NO: 54137 - DNA, 15 bp, Homo sapiens
ttattgatgaacgcc

SEQ ID NO: 54138 - DNA, 15 bp, Homo sapiens
tattgatgaacgccc

SEQ ID NO: 54139 - DNA, 15 bp, Homo sapiens
attgatgaacgcccc

SEQ ID NO: 54140 - DNA, 15 bp, Homo sapiens
ttgatgaacgccccc

SEQ ID NO: 54141 - DNA, 15 bp, Homo sapiens
tgatgaacgccccca

SEQ ID NO: 54142 - DNA, 15 bp, Homo sapiens
gatgaacgcccccag

SEQ ID NO: 54143 - DNA, 15 bp, Homo sapiens
atgaacgcccccaga

SEQ ID NO: 54144 - DNA, 15 bp, Homo sapiens
tgaacgcccccagat

SEQ ID NO: 54145 - DNA, 15 bp, Homo sapiens
gaacgcccccagata

SEQ ID NO: 54146 - DNA, 15 bp, Homo sapiens
aacgcccccagataa

SEQ ID NO: 54147 - DNA, 15 bp, Homo sapiens
acgcccccagataac

SEQ ID NO: 54148 - DNA, 15 bp, Homo sapiens
cgcccccagataacg

SEQ ID NO: 54149 - DNA, 15 bp, Homo sapiens
gcccccagataacgt

SEQ ID NO: 54150 - DNA, 15 bp, Homo sapiens
cccccagataacgtt

SEQ ID NO: 54151 - DNA, 15 bp, Homo sapiens
ccccagataacgtta

SEQ ID NO: 54152 - DNA, 15 bp, Homo sapiens
cccagataacgttac

SEQ ID NO: 54153 - DNA, 15 bp, Homo sapiens
ccagataacgttaca

SEQ ID NO: 54154 - DNA, 15 bp, Homo sapiens
cagataacgttacac

SEQ ID NO: 54155 - DNA, 15 bp, Homo sapiens
agataacgttacacc

SEQ ID NO: 54156 - DNA, 15 bp, Homo sapiens
gataacgttacacca

SEQ ID NO: 54157 - DNA, 15 bp, Homo sapiens
ataacgttacaccaa

SEQ ID NO: 54158 - DNA, 15 bp, Homo sapiens
taacgttacaccaag

SEQ ID NO: 54159 - DNA, 15 bp, Homo sapiens
aacgttacaccaagt

SEQ ID NO: 54160 - DNA, 15 bp, Homo sapiens
acgttacaccaagtt

SEQ ID NO: 54161 - DNA, 15 bp, Homo sapiens
cgttacaccaagtta

SEQ ID NO: 54162 - DNA, 15 bp, Homo sapiens
gttacaccaagttac

SEQ ID NO: 54163 - DNA, 15 bp, Homo sapiens
ttacaccaagttact

SEQ ID NO: 54164 - DNA, 15 bp, Homo sapiens
tacaccaagttactt

SEQ ID NO: 54165 - DNA, 15 bp, Homo sapiens
acaccaagttacttg

SEQ ID NO: 54166 - DNA, 15 bp, Homo sapiens
caccaagttacttgt

SEQ ID NO: 54167 - DNA, 15 bp, Homo sapiens
accaagttacttgtt

SEQ ID NO: 54168 - DNA, 15 bp, Homo sapiens
ccaagttacttgttc

SEQ ID NO: 54169 - DNA, 15 bp, Homo sapiens
caagttacttgttcc

SEQ ID NO: 54170 - DNA, 15 bp, Homo sapiens
aagttacttgttcca

SEQ ID NO: 54171 - DNA, 15 bp, Homo sapiens
agttacttgttccag

SEQ ID NO: 54172 - DNA, 15 bp, Homo sapiens
gttacttgttccagc

SEQ ID NO: 54173 - DNA, 15 bp, Homo sapiens
ttacttgttccagcc

SEQ ID NO: 54174 - DNA, 15 bp, Homo sapiens
tacttgttccagcca

SEQ ID NO: 54175 - DNA, 15 bp, Homo sapiens
acttgttccagccag

SEQ ID NO: 54176 - DNA, 15 bp, Homo sapiens
cttgttccagccagg

SEQ ID NO: 54177 - DNA, 15 bp, Homo sapiens
ttgttccagccagga

SEQ ID NO: 54178 - DNA, 15 bp, Homo sapiens
tgttccagccaggaa

SEQ ID NO: 54179 - DNA, 15 bp, Homo sapiens
gttccagccaggaag

SEQ ID NO: 54180 - DNA, 15 bp, Homo sapiens
ttccagccaggaagc

SEQ ID NO: 54181 - DNA, 15 bp, Homo sapiens
tccagccaggaagcc

SEQ ID NO: 54182 - DNA, 15 bp, Homo sapiens
ccagccaggaagccc

SEQ ID NO: 54183 - DNA, 15 bp, Homo sapiens
cagccaggaagccca

SEQ ID NO: 54184 - DNA, 15 bp, Homo sapiens
agccaggaagcccag

SEQ ID NO: 54185 - DNA, 15 bp, Homo sapiens
gccaggaagcccagg

SEQ ID NO: 54186 - DNA, 15 bp, Homo sapiens
ccaggaagcccaggc

SEQ ID NO: 54187 - DNA, 15 bp, Homo sapiens
caggaagcccaggca

SEQ ID NO: 54188 - DNA, 15 bp, Homo sapiens
aggaagcccaggcaa

SEQ ID NO: 54189 - DNA, 15 bp, Homo sapiens
ggaagcccaggcaat

SEQ ID NO: 54190 - DNA, 15 bp, Homo sapiens
gaagcccaggcaatg

SEQ ID NO: 54191 - DNA, 15 bp, Homo sapiens
aagcccaggcaatga

SEQ ID NO: 54192 - DNA, 15 bp, Homo sapiens
agcccaggcaatgac

SEQ ID NO: 54193 - DNA, 15 bp, Homo sapiens
gcccaggcaatgaca

SEQ ID NO: 54194 - DNA, 15 bp, Homo sapiens
cccaggcaatgacag

SEQ ID NO: 54195 - DNA, 15 bp, Homo sapiens
ccaggcaatgacaga

SEQ ID NO: 54196 - DNA, 15 bp, Homo sapiens
caggcaatgacagac

SEQ ID NO: 54197 - DNA, 15 bp, Homo sapiens
aggcaatgacagacc

SEQ ID NO: 54198 - DNA, 15 bp, Homo sapiens
ggcaatgacagacct

SEQ ID NO: 54199 - DNA, 15 bp, Homo sapiens
gcaatgacagacctc

SEQ ID NO: 54200 - DNA, 15 bp, Homo sapiens
caatgacagacctcg

SEQ ID NO: 54201 - DNA, 15 bp, Homo sapiens
aatgacagacctcgc

SEQ ID NO: 54202 - DNA, 15 bp, Homo sapiens
atgacagacctcgct

SEQ ID NO: 54203 - DNA, 15 bp, Homo sapiens
tgacagacctcgcta

SEQ ID NO: 54204 - DNA, 15 bp, Homo sapiens
gacagacctcgctaa

SEQ ID NO: 54205 - DNA, 15 bp, Homo sapiens
acagacctcgctaaa

SEQ ID NO: 54206 - DNA, 15 bp, Homo sapiens
cagacctcgctaaag

SEQ ID NO: 54207 - DNA, 15 bp, Homo sapiens
agacctcgctaaagc

SEQ ID NO: 54208 - DNA, 15 bp, Homo sapiens
gacctcgctaaagcc

SEQ ID NO: 54209 - DNA, 15 bp, Homo sapiens
acctcgctaaagcca

SEQ ID NO: 54210 - DNA, 15 bp, Homo sapiens
cctcgctaaagccac

SEQ ID NO: 54211 - DNA, 15 bp, Homo sapiens
ctcgctaaagccaca

SEQ ID NO: 54212 - DNA, 15 bp, Homo sapiens
tcgctaaagccacac

SEQ ID NO: 54213 - DNA, 15 bp, Homo sapiens
cgctaaagccacacg

SEQ ID NO: 54214 - DNA, 15 bp, Homo sapiens
gctaaagccacacgc

SEQ ID NO: 54215 - DNA, 15 bp, Homo sapiens
ctaaagccacacgct

SEQ ID NO: 54216 - DNA, 15 bp, Homo sapiens
taaagccacacgctt

SEQ ID NO: 54217 - DNA, 15 bp, Homo sapiens
aaagccacacgcttt

SEQ ID NO: 54218 - DNA, 15 bp, Homo sapiens
aagccacacgctttc

SEQ ID NO: 54219 - DNA, 15 bp, Homo sapiens
agccacacgctttct

SEQ ID NO: 54220 - DNA, 15 bp, Homo sapiens
gccacacgctttcta

SEQ ID NO: 54221 - DNA, 15 bp, Homo sapiens
ccacacgctttctag

SEQ ID NO: 54222 - DNA, 15 bp, Homo sapiens
cacacgctttctagc

SEQ ID NO: 54223 - DNA, 15 bp, Homo sapiens
acacgctttctagcc

SEQ ID NO: 54224 - DNA, 15 bp, Homo sapiens
cacgctttctagccg

SEQ ID NO: 54225 - DNA, 15 bp, Homo sapiens
acgctttctagccga

SEQ ID NO: 54226 - DNA, 15 bp, Homo sapiens
cgctttctagccgac

SEQ ID NO: 54227 - DNA, 15 bp, Homo sapiens
gctttctagccgacc

SEQ ID NO: 54228 - DNA, 15 bp, Homo sapiens
ctttctagccgacca

SEQ ID NO: 54229 - DNA, 15 bp, Homo sapiens
tttctagccgaccaa

SEQ ID NO: 54230 - DNA, 15 bp, Homo sapiens
ttctagccgaccaaa

SEQ ID NO: 54231 - DNA, 15 bp, Homo sapiens
tctagccgaccaaac

SEQ ID NO: 54232 - DNA, 15 bp, Homo sapiens
ctagccgaccaaaca

SEQ ID NO: 54233 - DNA, 15 bp, Homo sapiens
tagccgaccaaacag

SEQ ID NO: 54234 - DNA, 15 bp, Homo sapiens
agccgaccaaacaga

SEQ ID NO: 54235 - DNA, 15 bp, Homo sapiens
gccgaccaaacagaa

SEQ ID NO: 54236 - DNA, 15 bp, Homo sapiens
ccgaccaaacagaaa

SEQ ID NO: 54237 - DNA, 15 bp, Homo sapiens
cgaccaaacagaaaa

SEQ ID NO: 54238 - DNA, 15 bp, Homo sapiens
gaccaaacagaaaaa

SEQ ID NO: 54239 - DNA, 15 bp, Homo sapiens
accaaacagaaaaac

SEQ ID NO: 54240 - DNA, 15 bp, Homo sapiens
ccaaacagaaaaacg

SEQ ID NO: 54241 - DNA, 15 bp, Homo sapiens
caaacagaaaaacgg

SEQ ID NO: 54242 - DNA, 15 bp, Homo sapiens
aaacagaaaaacgga

SEQ ID NO: 54243 - DNA, 15 bp, Homo sapiens
aacagaaaaacggaa

SEQ ID NO: 54244 - DNA, 15 bp, Homo sapiens
acagaaaaacggaaa

SEQ ID NO: 54245 - DNA, 15 bp, Homo sapiens
cagaaaaacggaaag

SEQ ID NO: 54246 - DNA, 15 bp, Homo sapiens
agaaaaacggaaaga

SEQ ID NO: 54247 - DNA, 15 bp, Homo sapiens
gaaaaacggaaagag

SEQ ID NO: 54248 - DNA, 15 bp, Homo sapiens
aaaaacggaaagaga

SEQ ID NO: 54249 - DNA, 15 bp, Homo sapiens
aaaacggaaagagaa

SEQ ID NO: 54250 - DNA, 15 bp, Homo sapiens
aaacggaaagagaaa

SEQ ID NO: 54251 - DNA, 15 bp, Homo sapiens
aacggaaagagaaag

SEQ ID NO: 54252 - DNA, 15 bp, Homo sapiens
acggaaagagaaaga

SEQ ID NO: 54253 - DNA, 15 bp, Homo sapiens
cggaaagagaaagaa

SEQ ID NO: 54254 - DNA, 15 bp, Homo sapiens
ggaaagagaaagaaa

SEQ ID NO: 54255 - DNA, 15 bp, Homo sapiens
gaaagagaaagaaag

SEQ ID NO: 54256 - DNA, 15 bp, Homo sapiens
aaagagaaagaaaga

SEQ ID NO: 54257 - DNA, 15 bp, Homo sapiens
aagagaaagaaagaa

SEQ ID NO: 54258 - DNA, 15 bp, Homo sapiens
agagaaagaaagaaa

SEQ ID NO: 54259 - DNA, 15 bp, Homo sapiens
gagaaagaaagaaaa

SEQ ID NO: 54260 - DNA, 15 bp, Homo sapiens
agaaagaaagaaaac

SEQ ID NO: 54261 - DNA, 15 bp, Homo sapiens
gaaagaaagaaaaca

SEQ ID NO: 54262 - DNA, 15 bp, Homo sapiens
aaagaaagaaaacaa

SEQ ID NO: 54263 - DNA, 15 bp, Homo sapiens
aagaaagaaaacaaa

SEQ ID NO: 54264 - DNA, 15 bp, Homo sapiens
agaaagaaaacaaac

SEQ ID NO: 54265 - DNA, 15 bp, Homo sapiens
gaaagaaaacaaacc

SEQ ID NO: 54266 - DNA, 15 bp, Homo sapiens
aaagaaaacaaaccc

SEQ ID NO: 54267 - DNA, 15 bp, Homo sapiens
aagaaaacaaaccca

SEQ ID NO: 54268 - DNA, 15 bp, Homo sapiens
agaaaacaaacccac

SEQ ID NO: 54269 - DNA, 15 bp, Homo sapiens
gaaaacaaacccacc

SEQ ID NO: 54270 - DNA, 15 bp, Homo sapiens
aaaacaaacccacct

SEQ ID NO: 54271 - DNA, 15 bp, Homo sapiens
aaacaaacccacctt

SEQ ID NO: 54272 - DNA, 15 bp, Homo sapiens
aacaaacccaccttt

SEQ ID NO: 54273 - DNA, 15 bp, Homo sapiens
acaaacccacctttt

SEQ ID NO: 54274 - DNA, 15 bp, Homo sapiens
caaacccaccttttc

SEQ ID NO: 54275 - DNA, 15 bp, Homo sapiens
aaacccaccttttca

SEQ ID NO: 54276 - DNA, 15 bp, Homo sapiens
aacccaccttttcag

SEQ ID NO: 54277 - DNA, 15 bp, Homo sapiens
acccaccttttcagt

SEQ ID NO: 54278 - DNA, 15 bp, Homo sapiens
cccaccttttcagtc

SEQ ID NO: 54279 - DNA, 15 bp, Homo sapiens
ccaccttttcagtca

SEQ ID NO: 54280 - DNA, 15 bp, Homo sapiens
caccttttcagtcac

SEQ ID NO: 54281 - DNA, 15 bp, Homo sapiens
accttttcagtcact

SEQ ID NO: 54282 - DNA, 15 bp, Homo sapiens
ccttttcagtcacta

SEQ ID NO: 54283 - DNA, 15 bp, Homo sapiens
cttttcagtcactac

SEQ ID NO: 54284 - DNA, 15 bp, Homo sapiens
ttttcagtcactact

SEQ ID NO: 54285 - DNA, 15 bp, Homo sapiens
tttcagtcactactt

SEQ ID NO: 54286 - DNA, 15 bp, Homo sapiens
ttcagtcactacttg

SEQ ID NO: 54287 - DNA, 15 bp, Homo sapiens
tcagtcactacttgt

SEQ ID NO: 54288 - DNA, 15 bp, Homo sapiens
cagtcactacttgtc

SEQ ID NO: 54289 - DNA, 15 bp, Homo sapiens
agtcactacttgtca

SEQ ID NO: 54290 - DNA, 15 bp, Homo sapiens
gtcactacttgtcaa

SEQ ID NO: 54291 - DNA, 15 bp, Homo sapiens
tcactacttgtcaaa

SEQ ID NO: 54292 - DNA, 15 bp, Homo sapiens
cactacttgtcaaag

SEQ ID NO: 54293 - DNA, 15 bp, Homo sapiens
actacttgtcaaagt

SEQ ID NO: 54294 - DNA, 15 bp, Homo sapiens
ctacttgtcaaagta

SEQ ID NO: 54295 - DNA, 15 bp, Homo sapiens
tacttgtcaaagtaa

SEQ ID NO: 54296 - DNA, 15 bp, Homo sapiens
acttgtcaaagtaac

SEQ ID NO: 54297 - DNA, 15 bp, Homo sapiens
cttgtcaaagtaacc

SEQ ID NO: 54298 - DNA, 15 bp, Homo sapiens
ttgtcaaagtaacca

SEQ ID NO: 54299 - DNA, 15 bp, Homo sapiens
tgtcaaagtaaccat

SEQ ID NO: 54300 - DNA, 15 bp, Homo sapiens
gtcaaagtaaccatc

SEQ ID NO: 54301 - DNA, 15 bp, Homo sapiens
tcaaagtaaccatca

SEQ ID NO: 54302 - DNA, 15 bp, Homo sapiens
caaagtaaccatcaa

SEQ ID NO: 54303 - DNA, 15 bp, Homo sapiens
aaagtaaccatcaag

SEQ ID NO: 54304 - DNA, 15 bp, Homo sapiens
aagtaaccatcaagg

SEQ ID NO: 54305 - DNA, 15 bp, Homo sapiens
agtaaccatcaaggc

SEQ ID NO: 54306 - DNA, 15 bp, Homo sapiens
gtaaccatcaaggca

SEQ ID NO: 54307 - DNA, 15 bp, Homo sapiens
taaccatcaaggcag

SEQ ID NO: 54308 - DNA, 15 bp, Homo sapiens
aaccatcaaggcagc

SEQ ID NO: 54309 - DNA, 15 bp, Homo sapiens
accatcaaggcagct

SEQ ID NO: 54310 - DNA, 15 bp, Homo sapiens
ccatcaaggcagctg

SEQ ID NO: 54311 - DNA, 15 bp, Homo sapiens
catcaaggcagctgc

SEQ ID NO: 54312 - DNA, 15 bp, Homo sapiens
atcaaggcagctgct

SEQ ID NO: 54313 - DNA, 15 bp, Homo sapiens
tcaaggcagctgctc

SEQ ID NO: 54314 - DNA, 15 bp, Homo sapiens
caaggcagctgctcc

SEQ ID NO: 54315 - DNA, 15 bp, Homo sapiens
aaggcagctgctccg

SEQ ID NO: 54316 - DNA, 15 bp, Homo sapiens
aggcagctgctccgg

SEQ ID NO: 54317 - DNA, 15 bp, Homo sapiens
ggcagctgctccggg

SEQ ID NO: 54318 - DNA, 15 bp, Homo sapiens
gcagctgctccggga

SEQ ID NO: 54319 - DNA, 15 bp, Homo sapiens
cagctgctccgggaa

SEQ ID NO: 54320 - DNA, 15 bp, Homo sapiens
agctgctccgggaaa

SEQ ID NO: 54321 - DNA, 15 bp, Homo sapiens
gctgctccgggaaag

SEQ ID NO: 54322 - DNA, 15 bp, Homo sapiens
ctgctccgggaaaga

SEQ ID NO: 54323 - DNA, 15 bp, Homo sapiens
tgctccgggaaagac

SEQ ID NO: 54324 - DNA, 15 bp, Homo sapiens
gctccgggaaagact

SEQ ID NO: 54325 - DNA, 15 bp, Homo sapiens
ctccgggaaagactt

SEQ ID NO: 54326 - DNA, 15 bp, Homo sapiens
tccgggaaagacttc

SEQ ID NO: 54327 - DNA, 15 bp, Homo sapiens
ccgggaaagacttcg

SEQ ID NO: 54328 - DNA, 15 bp, Homo sapiens
cgggaaagacttcgg

SEQ ID NO: 54329 - DNA, 15 bp, Homo sapiens
gggaaagacttcggc

SEQ ID NO: 54330 - DNA, 15 bp, Homo sapiens
ggaaagacttcggcc

SEQ ID NO: 54331 - DNA, 15 bp, Homo sapiens
gaaagacttcggccc

SEQ ID NO: 54332 - DNA, 15 bp, Homo sapiens
aaagacttcggcccc

SEQ ID NO: 54333 - DNA, 15 bp, Homo sapiens
aagacttcggcccca

SEQ ID NO: 54334 - DNA, 15 bp, Homo sapiens
agacttcggccccaa

SEQ ID NO: 54335 - DNA, 15 bp, Homo sapiens
gacttcggccccaaa

SEQ ID NO: 54336 - DNA, 15 bp, Homo sapiens
acttcggccccaaaa

SEQ ID NO: 54337 - DNA, 15 bp, Homo sapiens
cttcggccccaaaac

SEQ ID NO: 54338 - DNA, 15 bp, Homo sapiens
ttcggccccaaaact

SEQ ID NO: 54339 - DNA, 15 bp, Homo sapiens
tcggccccaaaactc

SEQ ID NO: 54340 - DNA, 15 bp, Homo sapiens
cggccccaaaactcc

SEQ ID NO: 54341 - DNA, 15 bp, Homo sapiens
ggccccaaaactccc

SEQ ID NO: 54342 - DNA, 15 bp, Homo sapiens
gccccaaaactccca

SEQ ID NO: 54343 - DNA, 15 bp, Homo sapiens
ccccaaaactcccac

SEQ ID NO: 54344 - DNA, 15 bp, Homo sapiens
cccaaaactcccaca

SEQ ID NO: 54345 - DNA, 15 bp, Homo sapiens
ccaaaactcccacac

SEQ ID NO: 54346 - DNA, 15 bp, Homo sapiens
caaaactcccacact

SEQ ID NO: 54347 - DNA, 15 bp, Homo sapiens
aaaactcccacactc

SEQ ID NO: 54348 - DNA, 15 bp, Homo sapiens
aaactcccacactct

SEQ ID NO: 54349 - DNA, 15 bp, Homo sapiens
aactcccacactcta

SEQ ID NO: 54350 - DNA, 15 bp, Homo sapiens
actcccacactctat

SEQ ID NO: 54351 - DNA, 15 bp, Homo sapiens
ctcccacactctatt

SEQ ID NO: 54352 - DNA, 15 bp, Homo sapiens
tcccacactctatta

SEQ ID NO: 54353 - DNA, 15 bp, Homo sapiens
cccacactctattat

SEQ ID NO: 54354 - DNA, 15 bp, Homo sapiens
ccacactctattatt

SEQ ID NO: 54355 - DNA, 15 bp, Homo sapiens
cacactctattattt

SEQ ID NO: 54356 - DNA, 15 bp, Homo sapiens
acactctattatttt

SEQ ID NO: 54357 - DNA, 15 bp, Homo sapiens
cactctattattttt

SEQ ID NO: 54358 - DNA, 15 bp, Homo sapiens
actctattatttttt

SEQ ID NO: 54359 - DNA, 15 bp, Homo sapiens
ctctattattttttc

SEQ ID NO: 54360 - DNA, 15 bp, Homo sapiens
tctattattttttca

SEQ ID NO: 54361 - DNA, 15 bp, Homo sapiens
ctattattttttcac

SEQ ID NO: 54362 - DNA, 15 bp, Homo sapiens
tattattttttcacg

SEQ ID NO: 54363 - DNA, 15 bp, Homo sapiens
attattttttcacgt

SEQ ID NO: 54364 - DNA, 15 bp, Homo sapiens
ttattttttcacgtt

SEQ ID NO: 54365 - DNA, 15 bp, Homo sapiens
tattttttcacgttc

SEQ ID NO: 54366 - DNA, 15 bp, Homo sapiens
attttttcacgttcc

SEQ ID NO: 54367 - DNA, 15 bp, Homo sapiens
ttttttcacgttccc

SEQ ID NO: 54368 - DNA, 15 bp, Homo sapiens
tttttcacgttccct

SEQ ID NO: 54369 - DNA, 15 bp, Homo sapiens
ttttcacgttccctt

SEQ ID NO: 54370 - DNA, 15 bp, Homo sapiens
tttcacgttcccttc

SEQ ID NO: 54371 - DNA, 15 bp, Homo sapiens
ttcacgttcccttcg

SEQ ID NO: 54372 - DNA, 15 bp, Homo sapiens
tcacgttcccttcgc

SEQ ID NO: 54373 - DNA, 15 bp, Homo sapiens
cacgttcccttcgct

SEQ ID NO: 54374 - DNA, 15 bp, Homo sapiens
acgttcccttcgctt

SEQ ID NO: 54375 - DNA, 15 bp, Homo sapiens
cgttcccttcgctta

SEQ ID NO: 54376 - DNA, 15 bp, Homo sapiens
gttcccttcgcttaa

SEQ ID NO: 54377 - DNA, 15 bp, Homo sapiens
ttcccttcgcttaat

SEQ ID NO: 54378 - DNA, 15 bp, Homo sapiens
tcccttcgcttaatt

SEQ ID NO: 54379 - DNA, 15 bp, Homo sapiens
cccttcgcttaatta

SEQ ID NO: 54380 - DNA, 15 bp, Homo sapiens
ccttcgcttaattaa

SEQ ID NO: 54381 - DNA, 15 bp, Homo sapiens
cttcgcttaattaaa

SEQ ID NO: 54382 - DNA, 15 bp, Homo sapiens
ttcgcttaattaaag

SEQ ID NO: 54383 - DNA, 15 bp, Homo sapiens
tcgcttaattaaagg

SEQ ID NO: 54384 - DNA, 15 bp, Homo sapiens
cgcttaattaaaggg

SEQ ID NO: 54385 - DNA, 15 bp, Homo sapiens
gcttaattaaagggg

SEQ ID NO: 54386 - DNA, 15 bp, Homo sapiens
cttaattaaaggggg

SEQ ID NO: 54387 - DNA, 15 bp, Homo sapiens
ttaattaaagggggg

SEQ ID NO: 54388 - DNA, 15 bp, Homo sapiens
taattaaagggggga

SEQ ID NO: 54389 - DNA, 15 bp, Homo sapiens
aattaaaggggggag

SEQ ID NO: 54390 - DNA, 15 bp, Homo sapiens
attaaaggggggagg

SEQ ID NO: 54391 - DNA, 15 bp, Homo sapiens
ttaaaggggggaggg

SEQ ID NO: 54392 - DNA, 15 bp, Homo sapiens
taaaggggggagggg

SEQ ID NO: 54393 - DNA, 15 bp, Homo sapiens
aaaggggggaggggg

SEQ ID NO: 54394 - DNA, 15 bp, Homo sapiens
aaggggggagggggc

SEQ ID NO: 54395 - DNA, 15 bp, Homo sapiens
aggggggagggggcg

SEQ ID NO: 54396 - DNA, 15 bp, Homo sapiens
ggggggagggggcgc

SEQ ID NO: 54397 - DNA, 15 bp, Homo sapiens
gggggagggggcgcg

SEQ ID NO: 54398 - DNA, 15 bp, Homo sapiens
ggggagggggcgcga

SEQ ID NO: 54399 - DNA, 15 bp, Homo sapiens
gggagggggcgcgag

SEQ ID NO: 54400 - DNA, 15 bp, Homo sapiens
ggagggggcgcgagt

SEQ ID NO: 54401 - DNA, 15 bp, Homo sapiens
gagggggcgcgagtc

SEQ ID NO: 54402 - DNA, 15 bp, Homo sapiens
agggggcgcgagtct

SEQ ID NO: 54403 - DNA, 15 bp, Homo sapiens
gggggcgcgagtctt

SEQ ID NO: 54404 - DNA, 15 bp, Homo sapiens
ggggcgcgagtcttt

SEQ ID NO: 54405 - DNA, 15 bp, Homo sapiens
gggcgcgagtctttg

SEQ ID NO: 54406 - DNA, 15 bp, Homo sapiens
ggcgcgagtctttgg

SEQ ID NO: 54407 - DNA, 15 bp, Homo sapiens
gcgcgagtctttggt

SEQ ID NO: 54408 - DNA, 15 bp, Homo sapiens
cgcgagtctttggtg

SEQ ID NO: 54409 - DNA, 15 bp, Homo sapiens
gcgagtctttggtgc

SEQ ID NO: 54410 - DNA, 15 bp, Homo sapiens
cgagtctttggtgcc

SEQ ID NO: 54411 - DNA, 15 bp, Homo sapiens
gagtctttggtgccc

SEQ ID NO: 54412 - DNA, 15 bp, Homo sapiens
agtctttggtgcccg

SEQ ID NO: 54413 - DNA, 15 bp, Homo sapiens
gtctttggtgcccgg

SEQ ID NO: 54414 - DNA, 15 bp, Homo sapiens
tctttggtgcccggt

SEQ ID NO: 54415 - DNA, 15 bp, Homo sapiens
ctttggtgcccggta

SEQ ID NO: 54416 - DNA, 15 bp, Homo sapiens
tttggtgcccggtat

SEQ ID NO: 54417 - DNA, 15 bp, Homo sapiens
ttggtgcccggtatg

SEQ ID NO: 54418 - DNA, 15 bp, Homo sapiens
tggtgcccggtatgt

SEQ ID NO: 54419 - DNA, 15 bp, Homo sapiens
ggtgcccggtatgta

SEQ ID NO: 54420 - DNA, 15 bp, Homo sapiens
gtgcccggtatgtac

SEQ ID NO: 54421 - DNA, 15 bp, Homo sapiens
tgcccggtatgtact

SEQ ID NO: 54422 - DNA, 15 bp, Homo sapiens
gcccggtatgtactc

SEQ ID NO: 54423 - DNA, 15 bp, Homo sapiens
cccggtatgtactcc

SEQ ID NO: 54424 - DNA, 15 bp, Homo sapiens
ccggtatgtactcct

SEQ ID NO: 54425 - DNA, 15 bp, Homo sapiens
cggtatgtactcctt

SEQ ID NO: 54426 - DNA, 15 bp, Homo sapiens
ggtatgtactccttc

SEQ ID NO: 54427 - DNA, 15 bp, Homo sapiens
gtatgtactccttct

SEQ ID NO: 54428 - DNA, 15 bp, Homo sapiens
tatgtactccttctg

SEQ ID NO: 54429 - DNA, 15 bp, Homo sapiens
atgtactccttctgt

SEQ ID NO: 54430 - DNA, 15 bp, Homo sapiens
tgtactccttctgtt

SEQ ID NO: 54431 - DNA, 15 bp, Homo sapiens
gtactccttctgttc

SEQ ID NO: 54432 - DNA, 15 bp, Homo sapiens
tactccttctgttct

SEQ ID NO: 54433 - DNA, 15 bp, Homo sapiens
actccttctgttctg

SEQ ID NO: 54434 - DNA, 15 bp, Homo sapiens
ctccttctgttctgc

SEQ ID NO: 54435 - DNA, 15 bp, Homo sapiens
tccttctgttctgca

SEQ ID NO: 54436 - DNA, 15 bp, Homo sapiens
ccttctgttctgcag

SEQ ID NO: 54437 - DNA, 15 bp, Homo sapiens
cttctgttctgcagc

SEQ ID NO: 54438 - DNA, 15 bp, Homo sapiens
ttctgttctgcagca

SEQ ID NO: 54439 - DNA, 15 bp, Homo sapiens
tctgttctgcagcaa

SEQ ID NO: 54440 - DNA, 15 bp, Homo sapiens
ctgttctgcagcaaa

SEQ ID NO: 54441 - DNA, 15 bp, Homo sapiens
tgttctgcagcaaag

SEQ ID NO: 54442 - DNA, 15 bp, Homo sapiens
gttctgcagcaaaga

SEQ ID NO: 54443 - DNA, 15 bp, Homo sapiens
ttctgcagcaaagaa

SEQ ID NO: 54444 - DNA, 15 bp, Homo sapiens
tctgcagcaaagaag

SEQ ID NO: 54445 - DNA, 15 bp, Homo sapiens
ctgcagcaaagaagt

SEQ ID NO: 54446 - DNA, 15 bp, Homo sapiens
tgcagcaaagaagtt

SEQ ID NO: 54447 - DNA, 15 bp, Homo sapiens
gcagcaaagaagtta

SEQ ID NO: 54448 - DNA, 15 bp, Homo sapiens
cagcaaagaagttaa

SEQ ID NO: 54449 - DNA, 15 bp, Homo sapiens
agcaaagaagttaaa

SEQ ID NO: 54450 - DNA, 15 bp, Homo sapiens
gcaaagaagttaaat

SEQ ID NO: 54451 - DNA, 15 bp, Homo sapiens
caaagaagttaaatt

SEQ ID NO: 54452 - DNA, 15 bp, Homo sapiens
aaagaagttaaatta

SEQ ID NO: 54453 - DNA, 15 bp, Homo sapiens
aagaagttaaattat

SEQ ID NO: 54454 - DNA, 15 bp, Homo sapiens
agaagttaaattatt

SEQ ID NO: 54455 - DNA, 15 bp, Homo sapiens
gaagttaaattattg

SEQ ID NO: 54456 - DNA, 15 bp, Homo sapiens
aagttaaattattga

SEQ ID NO: 54457 - DNA, 15 bp, Homo sapiens
agttaaattattgat

SEQ ID NO: 54458 - DNA, 15 bp, Homo sapiens
gttaaattattgata

SEQ ID NO: 54459 - DNA, 15 bp, Homo sapiens
ttaaattattgatag

SEQ ID NO: 54460 - DNA, 15 bp, Homo sapiens
taaattattgatagt

SEQ ID NO: 54461 - DNA, 15 bp, Homo sapiens
aaattattgatagtg

SEQ ID NO: 54462 - DNA, 15 bp, Homo sapiens
aattattgatagtgg

SEQ ID NO: 54463 - DNA, 15 bp, Homo sapiens
attattgatagtgga

SEQ ID NO: 54464 - DNA, 15 bp, Homo sapiens
ttattgatagtggaa

SEQ ID NO: 54465 - DNA, 15 bp, Homo sapiens
tattgatagtggaaa

SEQ ID NO: 54466 - DNA, 15 bp, Homo sapiens
attgatagtggaaat

SEQ ID NO: 54467 - DNA, 15 bp, Homo sapiens
ttgatagtggaaatt

SEQ ID NO: 54468 - DNA, 15 bp, Homo sapiens
tgatagtggaaattg

SEQ ID NO: 54469 - DNA, 15 bp, Homo sapiens
gatagtggaaattgc

SEQ ID NO: 54470 - DNA, 15 bp, Homo sapiens
atagtggaaattgca

SEQ ID NO: 54471 - DNA, 15 bp, Homo sapiens
tagtggaaattgcat

SEQ ID NO: 54472 - DNA, 15 bp, Homo sapiens
agtggaaattgcatg

SEQ ID NO: 54473 - DNA, 15 bp, Homo sapiens
gtggaaattgcatgg

SEQ ID NO: 54474 - DNA, 15 bp, Homo sapiens
tggaaattgcatggc

SEQ ID NO: 54475 - DNA, 15 bp, Homo sapiens
ggaaattgcatggcg

SEQ ID NO: 54476 - DNA, 15 bp, Homo sapiens
gaaattgcatggcgg

SEQ ID NO: 54477 - DNA, 15 bp, Homo sapiens
aaattgcatggcgga

SEQ ID NO: 54478 - DNA, 15 bp, Homo sapiens
aattgcatggcggag

SEQ ID NO: 54479 - DNA, 15 bp, Homo sapiens
attgcatggcggagg

SEQ ID NO: 54480 - DNA, 15 bp, Homo sapiens
ttgcatggcggaggt

SEQ ID NO: 54481 - DNA, 15 bp, Homo sapiens
tgcatggcggaggta

SEQ ID NO: 54482 - DNA, 15 bp, Homo sapiens
gcatggcggaggtaa

SEQ ID NO: 54483 - DNA, 15 bp, Homo sapiens
catggcggaggtaat

SEQ ID NO: 54484 - DNA, 15 bp, Homo sapiens
atggcggaggtaata

SEQ ID NO: 54485 - DNA, 15 bp, Homo sapiens
tggcggaggtaatac

SEQ ID NO: 54486 - DNA, 15 bp, Homo sapiens
ggcggaggtaatact

SEQ ID NO: 54487 - DNA, 15 bp, Homo sapiens
gcggaggtaatactc

SEQ ID NO: 54488 - DNA, 15 bp, Homo sapiens
cggaggtaatactcg

SEQ ID NO: 54489 - DNA, 15 bp, Homo sapiens
ggaggtaatactcgc

SEQ ID NO: 54490 - DNA, 15 bp, Homo sapiens
gaggtaatactcgca

SEQ ID NO: 54491 - DNA, 15 bp, Homo sapiens
aggtaatactcgcac

SEQ ID NO: 54492 - DNA, 15 bp, Homo sapiens
ggtaatactcgcacc

SEQ ID NO: 54493 - DNA, 15 bp, Homo sapiens
gtaatactcgcaccc

SEQ ID NO: 54494 - DNA, 15 bp, Homo sapiens
taatactcgcacccc

SEQ ID NO: 54495 - DNA, 15 bp, Homo sapiens
aatactcgcacccca

SEQ ID NO: 54496 - DNA, 15 bp, Homo sapiens
atactcgcaccccat

SEQ ID NO: 54497 - DNA, 15 bp, Homo sapiens
tactcgcaccccatc

SEQ ID NO: 54498 - DNA, 15 bp, Homo sapiens
actcgcaccccatca

SEQ ID NO: 54499 - DNA, 15 bp, Homo sapiens
ctcgcaccccatcag

SEQ ID NO: 54500 - DNA, 15 bp, Homo sapiens
tcgcaccccatcagc

SEQ ID NO: 54501 - DNA, 15 bp, Homo sapiens
cgcaccccatcagcg

SEQ ID NO: 54502 - DNA, 15 bp, Homo sapiens
gcaccccatcagcga

SEQ ID NO: 54503 - DNA, 15 bp, Homo sapiens
caccccatcagcgag

SEQ ID NO: 54504 - DNA, 15 bp, Homo sapiens
accccatcagcgaga

SEQ ID NO: 54505 - DNA, 15 bp, Homo sapiens
ccccatcagcgagaa

SEQ ID NO: 54506 - DNA, 15 bp, Homo sapiens
cccatcagcgagaag

SEQ ID NO: 54507 - DNA, 15 bp, Homo sapiens
ccatcagcgagaagc

SEQ ID NO: 54508 - DNA, 15 bp, Homo sapiens
catcagcgagaagct

SEQ ID NO: 54509 - DNA, 15 bp, Homo sapiens
atcagcgagaagctc

SEQ ID NO: 54510 - DNA, 15 bp, Homo sapiens
tcagcgagaagctcc

SEQ ID NO: 54511 - DNA, 15 bp, Homo sapiens
cagcgagaagctcca

SEQ ID NO: 54512 - DNA, 15 bp, Homo sapiens
agcgagaagctccat

SEQ ID NO: 54513 - DNA, 15 bp, Homo sapiens
gcgagaagctccatt

SEQ ID NO: 54514 - DNA, 15 bp, Homo sapiens
cgagaagctccattt

SEQ ID NO: 54515 - DNA, 15 bp, Homo sapiens
gagaagctccatttg

SEQ ID NO: 54516 - DNA, 15 bp, Homo sapiens
agaagctccatttga

SEQ ID NO: 54517 - DNA, 15 bp, Homo sapiens
gaagctccatttgat

SEQ ID NO: 54518 - DNA, 15 bp, Homo sapiens
aagctccatttgatc

SEQ ID NO: 54519 - DNA, 15 bp, Homo sapiens
agctccatttgatct

SEQ ID NO: 54520 - DNA, 15 bp, Homo sapiens
gctccatttgatctc

SEQ ID NO: 54521 - DNA, 15 bp, Homo sapiens
ctccatttgatctcg

SEQ ID NO: 54522 - DNA, 15 bp, Homo sapiens
tccatttgatctcgg

SEQ ID NO: 54523 - DNA, 15 bp, Homo sapiens
ccatttgatctcggc

SEQ ID NO: 54524 - DNA, 15 bp, Homo sapiens
catttgatctcggca

SEQ ID NO: 54525 - DNA, 15 bp, Homo sapiens
atttgatctcggcag

SEQ ID NO: 54526 - DNA, 15 bp, Homo sapiens
tttgatctcggcaga

SEQ ID NO: 54527 - DNA, 15 bp, Homo sapiens
ttgatctcggcagag

SEQ ID NO: 54528 - DNA, 15 bp, Homo sapiens
tgatctcggcagagg

SEQ ID NO: 54529 - DNA, 15 bp, Homo sapiens
gatctcggcagaggc

SEQ ID NO: 54530 - DNA, 15 bp, Homo sapiens
atctcggcagaggca

SEQ ID NO: 54531 - DNA, 15 bp, Homo sapiens
tctcggcagaggcag

SEQ ID NO: 54532 - DNA, 15 bp, Homo sapiens
ctcggcagaggcagg

SEQ ID NO: 54533 - DNA, 15 bp, Homo sapiens
tcggcagaggcaggg

SEQ ID NO: 54534 - DNA, 15 bp, Homo sapiens
cggcagaggcaggga

SEQ ID NO: 54535 - DNA, 15 bp, Homo sapiens
ggcagaggcagggag

SEQ ID NO: 54536 - DNA, 15 bp, Homo sapiens
gcagaggcagggaga

SEQ ID NO: 54537 - DNA, 15 bp, Homo sapiens
cagaggcagggagat

SEQ ID NO: 54538 - DNA, 15 bp, Homo sapiens
agaggcagggagatt

SEQ ID NO: 54539 - DNA, 15 bp, Homo sapiens
gaggcagggagattt

SEQ ID NO: 54540 - DNA, 15 bp, Homo sapiens
aggcagggagatttc

SEQ ID NO: 54541 - DNA, 15 bp, Homo sapiens
ggcagggagatttca

SEQ ID NO: 54542 - DNA, 15 bp, Homo sapiens
gcagggagatttcat

SEQ ID NO: 54543 - DNA, 15 bp, Homo sapiens
cagggagatttcatg

SEQ ID NO: 54544 - DNA, 15 bp, Homo sapiens
agggagatttcatgc

SEQ ID NO: 54545 - DNA, 15 bp, Homo sapiens
gggagatttcatgct

SEQ ID NO: 54546 - DNA, 15 bp, Homo sapiens
ggagatttcatgcta

SEQ ID NO: 54547 - DNA, 15 bp, Homo sapiens
gagatttcatgctag

SEQ ID NO: 54548 - DNA, 15 bp, Homo sapiens
agatttcatgctagt

SEQ ID NO: 54549 - DNA, 15 bp, Homo sapiens
gatttcatgctagtt

SEQ ID NO: 54550 - DNA, 15 bp, Homo sapiens
atttcatgctagttc

SEQ ID NO: 54551 - DNA, 15 bp, Homo sapiens
tttcatgctagttcg

SEQ ID NO: 54552 - DNA, 15 bp, Homo sapiens
ttcatgctagttcgc

SEQ ID NO: 54553 - DNA, 15 bp, Homo sapiens
tcatgctagttcgcc

SEQ ID NO: 54554 - DNA, 15 bp, Homo sapiens
catgctagttcgccg

SEQ ID NO: 54555 - DNA, 15 bp, Homo sapiens
atgctagttcgccgg

SEQ ID NO: 54556 - DNA, 15 bp, Homo sapiens
tgctagttcgccggg

SEQ ID NO: 54557 - DNA, 15 bp, Homo sapiens
gctagttcgccgggg

SEQ ID NO: 54558 - DNA, 15 bp, Homo sapiens
ctagttcgccggggg

SEQ ID NO: 54559 - DNA, 15 bp, Homo sapiens
tagttcgccgggggg

SEQ ID NO: 54560 - DNA, 15 bp, Homo sapiens
agttcgccgggggga

SEQ ID NO: 54561 - DNA, 15 bp, Homo sapiens
gttcgccggggggag

SEQ ID NO: 54562 - DNA, 15 bp, Homo sapiens
ttcgccggggggagc

SEQ ID NO: 54563 - DNA, 15 bp, Homo sapiens
tcgccggggggagcg

SEQ ID NO: 54564 - DNA, 15 bp, Homo sapiens
cgccggggggagcgg

SEQ ID NO: 54565 - DNA, 15 bp, Homo sapiens
gccggggggagcggc

SEQ ID NO: 54566 - DNA, 15 bp, Homo sapiens
ccggggggagcggca

SEQ ID NO: 54567 - DNA, 15 bp, Homo sapiens
cggggggagcggcag

SEQ ID NO: 54568 - DNA, 15 bp, Homo sapiens
ggggggagcggcagc

SEQ ID NO: 54569 - DNA, 15 bp, Homo sapiens
gggggagcggcagcg

SEQ ID NO: 54570 - DNA, 15 bp, Homo sapiens
ggggagcggcagcga

SEQ ID NO: 54571 - DNA, 15 bp, Homo sapiens
gggagcggcagcgag

SEQ ID NO: 54572 - DNA, 15 bp, Homo sapiens
ggagcggcagcgaga

SEQ ID NO: 54573 - DNA, 15 bp, Homo sapiens
gagcggcagcgagag

SEQ ID NO: 54574 - DNA, 15 bp, Homo sapiens
agcggcagcgagagc

SEQ ID NO: 54575 - DNA, 15 bp, Homo sapiens
gcggcagcgagagca

SEQ ID NO: 54576 - DNA, 15 bp, Homo sapiens
cggcagcgagagcag

SEQ ID NO: 54577 - DNA, 15 bp, Homo sapiens
ggcagcgagagcagc

SEQ ID NO: 54578 - DNA, 15 bp, Homo sapiens
gcagcgagagcagcc

SEQ ID NO: 54579 - DNA, 15 bp, Homo sapiens
cagcgagagcagccc

SEQ ID NO: 54580 - DNA, 15 bp, Homo sapiens
agcgagagcagccct

SEQ ID NO: 54581 - DNA, 15 bp, Homo sapiens
gcgagagcagccctc

SEQ ID NO: 54582 - DNA, 15 bp, Homo sapiens
cgagagcagccctct

SEQ ID NO: 54583 - DNA, 15 bp, Homo sapiens
gagagcagccctctc

SEQ ID NO: 54584 - DNA, 15 bp, Homo sapiens
agagcagccctctcc

SEQ ID NO: 54585 - DNA, 15 bp, Homo sapiens
gagcagccctctccg

SEQ ID NO: 54586 - DNA, 15 bp, Homo sapiens
agcagccctctccgc

SEQ ID NO: 54587 - DNA, 15 bp, Homo sapiens
gcagccctctccgcg

SEQ ID NO: 54588 - DNA, 15 bp, Homo sapiens
cagccctctccgcgg

SEQ ID NO: 54589 - DNA, 15 bp, Homo sapiens
agccctctccgcggt

SEQ ID NO: 54590 - DNA, 15 bp, Homo sapiens
gccctctccgcggtg

SEQ ID NO: 54591 - DNA, 15 bp, Homo sapiens
ccctctccgcggtga

SEQ ID NO: 54592 - DNA, 15 bp, Homo sapiens
cctctccgcggtgaa

SEQ ID NO: 54593 - DNA, 15 bp, Homo sapiens
ctctccgcggtgaat

SEQ ID NO: 54594 - DNA, 15 bp, Homo sapiens
tctccgcggtgaatg

SEQ ID NO: 54595 - DNA, 15 bp, Homo sapiens
ctccgcggtgaatgg

SEQ ID NO: 54596 - DNA, 15 bp, Homo sapiens
tccgcggtgaatggg

SEQ ID NO: 54597 - DNA, 15 bp, Homo sapiens
ccgcggtgaatggga

SEQ ID NO: 54598 - DNA, 15 bp, Homo sapiens
cgcggtgaatgggaa

SEQ ID NO: 54599 - DNA, 15 bp, Homo sapiens
gcggtgaatgggaaa

SEQ ID NO: 54600 - DNA, 15 bp, Homo sapiens
cggtgaatgggaaag

SEQ ID NO: 54601 - DNA, 15 bp, Homo sapiens
ggtgaatgggaaagt

SEQ ID NO: 54602 - DNA, 15 bp, Homo sapiens
gtgaatgggaaagtg

SEQ ID NO: 54603 - DNA, 15 bp, Homo sapiens
tgaatgggaaagtgg

SEQ ID NO: 54604 - DNA, 15 bp, Homo sapiens
gaatgggaaagtggg

SEQ ID NO: 54605 - DNA, 15 bp, Homo sapiens
aatgggaaagtgggt

SEQ ID NO: 54606 - DNA, 15 bp, Homo sapiens
atgggaaagtgggtg

SEQ ID NO: 54607 - DNA, 15 bp, Homo sapiens
tgggaaagtgggtgg

SEQ ID NO: 54608 - DNA, 15 bp, Homo sapiens
gggaaagtgggtggg

SEQ ID NO: 54609 - DNA, 15 bp, Homo sapiens
ggaaagtgggtggga

SEQ ID NO: 54610 - DNA, 15 bp, Homo sapiens
gaaagtgggtgggag

SEQ ID NO: 54611 - DNA, 15 bp, Homo sapiens
aaagtgggtgggagt

SEQ ID NO: 54612 - DNA, 15 bp, Homo sapiens
aagtgggtgggagtc

SEQ ID NO: 54613 - DNA, 15 bp, Homo sapiens
agtgggtgggagtcc

SEQ ID NO: 54614 - DNA, 15 bp, Homo sapiens
gtgggtgggagtcca

SEQ ID NO: 54615 - DNA, 15 bp, Homo sapiens
tgggtgggagtccac

SEQ ID NO: 54616 - DNA, 15 bp, Homo sapiens
gggtgggagtccacg

SEQ ID NO: 54617 - DNA, 15 bp, Homo sapiens
ggtgggagtccacga

SEQ ID NO: 54618 - DNA, 15 bp, Homo sapiens
gtgggagtccacgag

SEQ ID NO: 54619 - DNA, 15 bp, Homo sapiens
tgggagtccacgaga

SEQ ID NO: 54620 - DNA, 15 bp, Homo sapiens
gggagtccacgagag

SEQ ID NO: 54621 - DNA, 15 bp, Homo sapiens
ggagtccacgagagg

SEQ ID NO: 54622 - DNA, 15 bp, Homo sapiens
gagtccacgagaggg

SEQ ID NO: 54623 - DNA, 15 bp, Homo sapiens
agtccacgagagggc

SEQ ID NO: 54624 - DNA, 15 bp, Homo sapiens
gtccacgagagggct

SEQ ID NO: 54625 - DNA, 15 bp, Homo sapiens
tccacgagagggctc

SEQ ID NO: 54626 - DNA, 15 bp, Homo sapiens
ccacgagagggctcc

SEQ ID NO: 54627 - DNA, 15 bp, Homo sapiens
cacgagagggctcca

SEQ ID NO: 54628 - DNA, 15 bp, Homo sapiens
acgagagggctccac

SEQ ID NO: 54629 - DNA, 15 bp, Homo sapiens
cgagagggctccacg

SEQ ID NO: 54630 - DNA, 15 bp, Homo sapiens
gagagggctccacgg

SEQ ID NO: 54631 - DNA, 15 bp, Homo sapiens
agagggctccacggt

SEQ ID NO: 54632 - DNA, 15 bp, Homo sapiens
gagggctccacggtg

SEQ ID NO: 54633 - DNA, 15 bp, Homo sapiens
agggctccacggtgc

SEQ ID NO: 54634 - DNA, 15 bp, Homo sapiens
gggctccacggtgcc

SEQ ID NO: 54635 - DNA, 15 bp, Homo sapiens
ggctccacggtgcct

SEQ ID NO: 54636 - DNA, 15 bp, Homo sapiens
gctccacggtgcctt

SEQ ID NO: 54637 - DNA, 15 bp, Homo sapiens
ctccacggtgccttg

SEQ ID NO: 54638 - DNA, 15 bp, Homo sapiens
tccacggtgccttga

SEQ ID NO: 54639 - DNA, 15 bp, Homo sapiens
ccacggtgccttgac

SEQ ID NO: 54640 - DNA, 15 bp, Homo sapiens
cacggtgccttgacg

SEQ ID NO: 54641 - DNA, 15 bp, Homo sapiens
acggtgccttgacgt

SEQ ID NO: 54642 - DNA, 15 bp, Homo sapiens
cggtgccttgacgtg

SEQ ID NO: 54643 - DNA, 15 bp, Homo sapiens
ggtgccttgacgtgc

SEQ ID NO: 54644 - DNA, 15 bp, Homo sapiens
gtgccttgacgtgcg

SEQ ID NO: 54645 - DNA, 15 bp, Homo sapiens
tgccttgacgtgcgc

SEQ ID NO: 54646 - DNA, 15 bp, Homo sapiens
gccttgacgtgcgct

SEQ ID NO: 54647 - DNA, 15 bp, Homo sapiens
ccttgacgtgcgctg

SEQ ID NO: 54648 - DNA, 15 bp, Homo sapiens
cttgacgtgcgctgt

SEQ ID NO: 54649 - DNA, 15 bp, Homo sapiens
ttgacgtgcgctgtc

SEQ ID NO: 54650 - DNA, 15 bp, Homo sapiens
tgacgtgcgctgtca

SEQ ID NO: 54651 - DNA, 15 bp, Homo sapiens
gacgtgcgctgtcat

SEQ ID NO: 54652 - DNA, 15 bp, Homo sapiens
acgtgcgctgtcata

SEQ ID NO: 54653 - DNA, 15 bp, Homo sapiens
cgtgcgctgtcatat

SEQ ID NO: 54654 - DNA, 15 bp, Homo sapiens
gtgcgctgtcatatg

SEQ ID NO: 54655 - DNA, 15 bp, Homo sapiens
tgcgctgtcatatga

SEQ ID NO: 54656 - DNA, 15 bp, Homo sapiens
gcgctgtcatatgat

SEQ ID NO: 54657 - DNA, 15 bp, Homo sapiens
cgctgtcatatgata

SEQ ID NO: 54658 - DNA, 15 bp, Homo sapiens
gctgtcatatgatac

SEQ ID NO: 54659 - DNA, 15 bp, Homo sapiens
ctgtcatatgatacc

SEQ ID NO: 54660 - DNA, 15 bp, Homo sapiens
tgtcatatgatacct

SEQ ID NO: 54661 - DNA, 15 bp, Homo sapiens
gtcatatgatacctc

SEQ ID NO: 54662 - DNA, 15 bp, Homo sapiens
tcatatgatacctcc

SEQ ID NO: 54663 - DNA, 15 bp, Homo sapiens
catatgatacctccg

SEQ ID NO: 54664 - DNA, 15 bp, Homo sapiens
atatgatacctccgc

SEQ ID NO: 54665 - DNA, 15 bp, Homo sapiens
tatgatacctccgct

SEQ ID NO: 54666 - DNA, 15 bp, Homo sapiens
atgatacctccgctg

SEQ ID NO: 54667 - DNA, 15 bp, Homo sapiens
tgatacctccgctgc

SEQ ID NO: 54668 - DNA, 15 bp, Homo sapiens
gatacctccgctgcc

SEQ ID NO: 54669 - DNA, 15 bp, Homo sapiens
atacctccgctgcct

SEQ ID NO: 54670 - DNA, 15 bp, Homo sapiens
tacctccgctgcctc

SEQ ID NO: 54671 - DNA, 15 bp, Homo sapiens
acctccgctgcctcg

SEQ ID NO: 54672 - DNA, 15 bp, Homo sapiens
cctccgctgcctcga

SEQ ID NO: 54673 - DNA, 15 bp, Homo sapiens
ctccgctgcctcgaa

SEQ ID NO: 54674 - DNA, 15 bp, Homo sapiens
tccgctgcctcgaaa

SEQ ID NO: 54675 - DNA, 15 bp, Homo sapiens
ccgctgcctcgaaat

SEQ ID NO: 54676 - DNA, 15 bp, Homo sapiens
cgctgcctcgaaata

SEQ ID NO: 54677 - DNA, 15 bp, Homo sapiens
gctgcctcgaaatag

SEQ ID NO: 54678 - DNA, 15 bp, Homo sapiens
ctgcctcgaaataga

SEQ ID NO: 54679 - DNA, 15 bp, Homo sapiens
tgcctcgaaatagac

SEQ ID NO: 54680 - DNA, 15 bp, Homo sapiens
gcctcgaaatagaca

SEQ ID NO: 54681 - DNA, 15 bp, Homo sapiens
cctcgaaatagacac

SEQ ID NO: 54682 - DNA, 15 bp, Homo sapiens
ctcgaaatagacact

SEQ ID NO: 54683 - DNA, 15 bp, Homo sapiens
tcgaaatagacactc

SEQ ID NO: 54684 - DNA, 15 bp, Homo sapiens
cgaaatagacactct

SEQ ID NO: 54685 - DNA, 15 bp, Homo sapiens
gaaatagacactcta

SEQ ID NO: 54686 - DNA, 15 bp, Homo sapiens
aaatagacactctag

SEQ ID NO: 54687 - DNA, 15 bp, Homo sapiens
aatagacactctagt

SEQ ID NO: 54688 - DNA, 15 bp, Homo sapiens
atagacactctagtg

SEQ ID NO: 54689 - DNA, 15 bp, Homo sapiens
tagacactctagtgc

SEQ ID NO: 54690 - DNA, 15 bp, Homo sapiens
agacactctagtgca

SEQ ID NO: 54691 - DNA, 15 bp, Homo sapiens
gacactctagtgcac

SEQ ID NO: 54692 - DNA, 15 bp, Homo sapiens
acactctagtgcacg

SEQ ID NO: 54693 - DNA, 15 bp, Homo sapiens
cactctagtgcacga

SEQ ID NO: 54694 - DNA, 15 bp, Homo sapiens
actctagtgcacgaa

SEQ ID NO: 54695 - DNA, 15 bp, Homo sapiens
ctctagtgcacgaat

SEQ ID NO: 54696 - DNA, 15 bp, Homo sapiens
tctagtgcacgaatt

SEQ ID NO: 54697 - DNA, 15 bp, Homo sapiens
ctagtgcacgaatta

SEQ ID NO: 54698 - DNA, 15 bp, Homo sapiens
tagtgcacgaattac

SEQ ID NO: 54699 - DNA, 15 bp, Homo sapiens
agtgcacgaattacc

SEQ ID NO: 54700 - DNA, 15 bp, Homo sapiens
gtgcacgaattacca

SEQ ID NO: 54701 - DNA, 15 bp, Homo sapiens
tgcacgaattaccag

SEQ ID NO: 54702 - DNA, 15 bp, Homo sapiens
gcacgaattaccaga

SEQ ID NO: 54703 - DNA, 15 bp, Homo sapiens
cacgaattaccagaa

SEQ ID NO: 54704 - DNA, 15 bp, Homo sapiens
acgaattaccagaat

SEQ ID NO: 54705 - DNA, 15 bp, Homo sapiens
cgaattaccagaatc

SEQ ID NO: 54706 - DNA, 15 bp, Homo sapiens
gaattaccagaatca

SEQ ID NO: 54707 - DNA, 15 bp, Homo sapiens
aattaccagaatcaa

SEQ ID NO: 54708 - DNA, 15 bp, Homo sapiens
attaccagaatcaaa

SEQ ID NO: 54709 - DNA, 15 bp, Homo sapiens
ttaccagaatcaaaa

SEQ ID NO: 54710 - DNA, 15 bp, Homo sapiens
taccagaatcaaaat

SEQ ID NO: 54711 - DNA, 15 bp, Homo sapiens
accagaatcaaaatt

SEQ ID NO: 54712 - DNA, 15 bp, Homo sapiens
ccagaatcaaaattc

SEQ ID NO: 54713 - DNA, 15 bp, Homo sapiens
cagaatcaaaattca

SEQ ID NO: 54714 - DNA, 15 bp, Homo sapiens
agaatcaaaattcag

SEQ ID NO: 54715 - DNA, 15 bp, Homo sapiens
gaatcaaaattcagc

SEQ ID NO: 54716 - DNA, 15 bp, Homo sapiens
aatcaaaattcagcg

SEQ ID NO: 54717 - DNA, 15 bp, Homo sapiens
atcaaaattcagcgc

SEQ ID NO: 54718 - DNA, 15 bp, Homo sapiens
tcaaaattcagcgca

SEQ ID NO: 54719 - DNA, 15 bp, Homo sapiens
caaaattcagcgcat

SEQ ID NO: 54720 - DNA, 15 bp, Homo sapiens
aaaattcagcgcatt

SEQ ID NO: 54721 - DNA, 15 bp, Homo sapiens
aaattcagcgcattt

SEQ ID NO: 54722 - DNA, 15 bp, Homo sapiens
aattcagcgcattta

SEQ ID NO: 54723 - DNA, 15 bp, Homo sapiens
attcagcgcatttaa

SEQ ID NO: 54724 - DNA, 15 bp, Homo sapiens
ttcagcgcatttaaa

SEQ ID NO: 54725 - DNA, 15 bp, Homo sapiens
tcagcgcatttaaaa

SEQ ID NO: 54726 - DNA, 15 bp, Homo sapiens
cagcgcatttaaaat

SEQ ID NO: 54727 - DNA, 15 bp, Homo sapiens
agcgcatttaaaatg

SEQ ID NO: 54728 - DNA, 15 bp, Homo sapiens
gcgcatttaaaatga

SEQ ID NO: 54729 - DNA, 15 bp, Homo sapiens
cgcatttaaaatgat

SEQ ID NO: 54730 - DNA, 15 bp, Homo sapiens
gcatttaaaatgata

SEQ ID NO: 54731 - DNA, 15 bp, Homo sapiens
catttaaaatgatac

SEQ ID NO: 54732 - DNA, 15 bp, Homo sapiens
atttaaaatgataca

SEQ ID NO: 54733 - DNA, 15 bp, Homo sapiens
tttaaaatgatacat

SEQ ID NO: 54734 - DNA, 15 bp, Homo sapiens
ttaaaatgatacatc

SEQ ID NO: 54735 - DNA, 15 bp, Homo sapiens
taaaatgatacatct

SEQ ID NO: 54736 - DNA, 15 bp, Homo sapiens
aaaatgatacatctt

SEQ ID NO: 54737 - DNA, 15 bp, Homo sapiens
aaatgatacatcttt

SEQ ID NO: 54738 - DNA, 15 bp, Homo sapiens
aatgatacatctttt

SEQ ID NO: 54739 - DNA, 15 bp, Homo sapiens
atgatacatctttta

SEQ ID NO: 54740 - DNA, 15 bp, Homo sapiens
tgatacatcttttat

SEQ ID NO: 54741 - DNA, 15 bp, Homo sapiens
gatacatcttttatt

SEQ ID NO: 54742 - DNA, 15 bp, Homo sapiens
atacatcttttatta

SEQ ID NO: 54743 - DNA, 15 bp, Homo sapiens
tacatcttttattag

SEQ ID NO: 54744 - DNA, 15 bp, Homo sapiens
acatcttttattaga

SEQ ID NO: 54745 - DNA, 15 bp, Homo sapiens
catcttttattagaa

SEQ ID NO: 54746 - DNA, 15 bp, Homo sapiens
atcttttattagaag

SEQ ID NO: 54747 - DNA, 15 bp, Homo sapiens
tcttttattagaaga

SEQ ID NO: 54748 - DNA, 15 bp, Homo sapiens
cttttattagaagag

SEQ ID NO: 54749 - DNA, 15 bp, Homo sapiens
ttttattagaagagt

SEQ ID NO: 54750 - DNA, 15 bp, Homo sapiens
tttattagaagagtt

SEQ ID NO: 54751 - DNA, 15 bp, Homo sapiens
ttattagaagagttc

SEQ ID NO: 54752 - DNA, 15 bp, Homo sapiens
tattagaagagttcc

SEQ ID NO: 54753 - DNA, 15 bp, Homo sapiens
attagaagagttccg

SEQ ID NO: 54754 - DNA, 15 bp, Homo sapiens
ttagaagagttccgt

SEQ ID NO: 54755 - DNA, 15 bp, Homo sapiens
tagaagagttccgtt

SEQ ID NO: 54756 - DNA, 15 bp, Homo sapiens
agaagagttccgttc

SEQ ID NO: 54757 - DNA, 15 bp, Homo sapiens
gaagagttccgttcc

SEQ ID NO: 54758 - DNA, 15 bp, Homo sapiens
aagagttccgttcca

SEQ ID NO: 54759 - DNA, 15 bp, Homo sapiens
agagttccgttccag

SEQ ID NO: 54760 - DNA, 15 bp, Homo sapiens
gagttccgttccagg

SEQ ID NO: 54761 - DNA, 15 bp, Homo sapiens
agttccgttccaggg

SEQ ID NO: 54762 - DNA, 15 bp, Homo sapiens
gttccgttccagggc

SEQ ID NO: 54763 - DNA, 15 bp, Homo sapiens
ttccgttccagggca

SEQ ID NO: 54764 - DNA, 15 bp, Homo sapiens
tccgttccagggcat

SEQ ID NO: 54765 - DNA, 15 bp, Homo sapiens
ccgttccagggcatt

SEQ ID NO: 54766 - DNA, 15 bp, Homo sapiens
cgttccagggcattg

SEQ ID NO: 54767 - DNA, 15 bp, Homo sapiens
gttccagggcattgc

SEQ ID NO: 54768 - DNA, 15 bp, Homo sapiens
ttccagggcattgca

SEQ ID NO: 54769 - DNA, 15 bp, Homo sapiens
tccagggcattgcat

SEQ ID NO: 54770 - DNA, 15 bp, Homo sapiens
ccagggcattgcatg

SEQ ID NO: 54771 - DNA, 15 bp, Homo sapiens
cagggcattgcatgc

SEQ ID NO: 54772 - DNA, 15 bp, Homo sapiens
agggcattgcatgct

SEQ ID NO: 54773 - DNA, 15 bp, Homo sapiens
gggcattgcatgctt

SEQ ID NO: 54774 - DNA, 15 bp, Homo sapiens
ggcattgcatgcttt

SEQ ID NO: 54775 - DNA, 15 bp, Homo sapiens
gcattgcatgctttt

SEQ ID NO: 54776 - DNA, 15 bp, Homo sapiens
cattgcatgcttttg

SEQ ID NO: 54777 - DNA, 15 bp, Homo sapiens
attgcatgcttttgc

SEQ ID NO: 54778 - DNA, 15 bp, Homo sapiens
ttgcatgcttttgca

SEQ ID NO: 54779 - DNA, 15 bp, Homo sapiens
tgcatgcttttgcag

SEQ ID NO: 54780 - DNA, 15 bp, Homo sapiens
gcatgcttttgcaga

SEQ ID NO: 54781 - DNA, 15 bp, Homo sapiens
catgcttttgcagat

SEQ ID NO: 54782 - DNA, 15 bp, Homo sapiens
atgcttttgcagatg

SEQ ID NO: 54783 - DNA, 15 bp, Homo sapiens
tgcttttgcagatgt

SEQ ID NO: 54784 - DNA, 15 bp, Homo sapiens
gcttttgcagatgtt

SEQ ID NO: 54785 - DNA, 15 bp, Homo sapiens
cttttgcagatgttt

SEQ ID NO: 54786 - DNA, 15 bp, Homo sapiens
ttttgcagatgtttt

SEQ ID NO: 54787 - DNA, 15 bp, Homo sapiens
tttgcagatgttttc

SEQ ID NO: 54788 - DNA, 15 bp, Homo sapiens
ttgcagatgttttca

SEQ ID NO: 54789 - DNA, 15 bp, Homo sapiens
tgcagatgttttcac

SEQ ID NO: 54790 - DNA, 15 bp, Homo sapiens
gcagatgttttcact

SEQ ID NO: 54791 - DNA, 15 bp, Homo sapiens
cagatgttttcactt

SEQ ID NO: 54792 - DNA, 15 bp, Homo sapiens
agatgttttcacttc

SEQ ID NO: 54793 - DNA, 15 bp, Homo sapiens
gatgttttcacttcc

SEQ ID NO: 54794 - DNA, 15 bp, Homo sapiens
atgttttcacttcca

SEQ ID NO: 54795 - DNA, 15 bp, Homo sapiens
tgttttcacttccag

SEQ ID NO: 54796 - DNA, 15 bp, Homo sapiens
gttttcacttccagc

SEQ ID NO: 54797 - DNA, 15 bp, Homo sapiens
ttttcacttccagcc

SEQ ID NO: 54798 - DNA, 15 bp, Homo sapiens
tttcacttccagccc

SEQ ID NO: 54799 - DNA, 15 bp, Homo sapiens
ttcacttccagcccc

SEQ ID NO: 54800 - DNA, 15 bp, Homo sapiens
tcacttccagcccca

SEQ ID NO: 54801 - DNA, 15 bp, Homo sapiens
cacttccagccccag

SEQ ID NO: 54802 - DNA, 15 bp, Homo sapiens
acttccagccccagc

SEQ ID NO: 54803 - DNA, 15 bp, Homo sapiens
cttccagccccagca

SEQ ID NO: 54804 - DNA, 15 bp, Homo sapiens
ttccagccccagcaa

SEQ ID NO: 54805 - DNA, 15 bp, Homo sapiens
tccagccccagcaaa

SEQ ID NO: 54806 - DNA, 15 bp, Homo sapiens
ccagccccagcaaac

SEQ ID NO: 54807 - DNA, 15 bp, Homo sapiens
cagccccagcaaaca

SEQ ID NO: 54808 - DNA, 15 bp, Homo sapiens
agccccagcaaacac

SEQ ID NO: 54809 - DNA, 15 bp, Homo sapiens
gccccagcaaacaca

SEQ ID NO: 54810 - DNA, 15 bp, Homo sapiens
ccccagcaaacacac

SEQ ID NO: 54811 - DNA, 15 bp, Homo sapiens
cccagcaaacacacg

SEQ ID NO: 54812 - DNA, 15 bp, Homo sapiens
ccagcaaacacacgt

SEQ ID NO: 54813 - DNA, 15 bp, Homo sapiens
cagcaaacacacgta

SEQ ID NO: 54814 - DNA, 15 bp, Homo sapiens
agcaaacacacgtat

SEQ ID NO: 54815 - DNA, 15 bp, Homo sapiens
gcaaacacacgtata

SEQ ID NO: 54816 - DNA, 15 bp, Homo sapiens
caaacacacgtataa

SEQ ID NO: 54817 - DNA, 15 bp, Homo sapiens
aaacacacgtataag

SEQ ID NO: 54818 - DNA, 15 bp, Homo sapiens
aacacacgtataagc

SEQ ID NO: 54819 - DNA, 15 bp, Homo sapiens
acacacgtataagct

SEQ ID NO: 54820 - DNA, 15 bp, Homo sapiens
cacacgtataagcta

SEQ ID NO: 54821 - DNA, 15 bp, Homo sapiens
acacgtataagctaa

SEQ ID NO: 54822 - DNA, 15 bp, Homo sapiens
cacgtataagctaac

SEQ ID NO: 54823 - DNA, 15 bp, Homo sapiens
acgtataagctaacc

SEQ ID NO: 54824 - DNA, 15 bp, Homo sapiens
cgtataagctaaccc

SEQ ID NO: 54825 - DNA, 15 bp, Homo sapiens
gtataagctaaccct

SEQ ID NO: 54826 - DNA, 15 bp, Homo sapiens
tataagctaaccctt

SEQ ID NO: 54827 - DNA, 15 bp, Homo sapiens
ataagctaacccttt

SEQ ID NO: 54828 - DNA, 15 bp, Homo sapiens
taagctaaccctttt

SEQ ID NO: 54829 - DNA, 15 bp, Homo sapiens
aagctaaccctttta

SEQ ID NO: 54830 - DNA, 15 bp, Homo sapiens
agctaacccttttaa

SEQ ID NO: 54831 - DNA, 15 bp, Homo sapiens
gctaacccttttaat

SEQ ID NO: 54832 - DNA, 15 bp, Homo sapiens
ctaacccttttaata

SEQ ID NO: 54833 - DNA, 15 bp, Homo sapiens
taacccttttaataa

SEQ ID NO: 54834 - DNA, 15 bp, Homo sapiens
aacccttttaataac

SEQ ID NO: 54835 - DNA, 15 bp, Homo sapiens
acccttttaataacg

SEQ ID NO: 54836 - DNA, 15 bp, Homo sapiens
cccttttaataacga

SEQ ID NO: 54837 - DNA, 15 bp, Homo sapiens
ccttttaataacgaa

SEQ ID NO: 54838 - DNA, 15 bp, Homo sapiens
cttttaataacgaac

SEQ ID NO: 54839 - DNA, 15 bp, Homo sapiens
ttttaataacgaacc

SEQ ID NO: 54840 - DNA, 15 bp, Homo sapiens
tttaataacgaacca

SEQ ID NO: 54841 - DNA, 15 bp, Homo sapiens
ttaataacgaaccag

SEQ ID NO: 54842 - DNA, 15 bp, Homo sapiens
taataacgaaccagg

SEQ ID NO: 54843 - DNA, 15 bp, Homo sapiens
aataacgaaccaggg

SEQ ID NO: 54844 - DNA, 15 bp, Homo sapiens
ataacgaaccagggc

SEQ ID NO: 54845 - DNA, 15 bp, Homo sapiens
taacgaaccagggca

SEQ ID NO: 54846 - DNA, 15 bp, Homo sapiens
aacgaaccagggcag

SEQ ID NO: 54847 - DNA, 15 bp, Homo sapiens
acgaaccagggcagc

SEQ ID NO: 54848 - DNA, 15 bp, Homo sapiens
cgaaccagggcagcc

SEQ ID NO: 54849 - DNA, 15 bp, Homo sapiens
gaaccagggcagcca

SEQ ID NO: 54850 - DNA, 15 bp, Homo sapiens
aaccagggcagccaa

SEQ ID NO: 54851 - DNA, 15 bp, Homo sapiens
accagggcagccaag

SEQ ID NO: 54852 - DNA, 15 bp, Homo sapiens
ccagggcagccaaga

SEQ ID NO: 54853 - DNA, 15 bp, Homo sapiens
cagggcagccaagat

SEQ ID NO: 54854 - DNA, 15 bp, Homo sapiens
agggcagccaagata

SEQ ID NO: 54855 - DNA, 15 bp, Homo sapiens
gggcagccaagataa

SEQ ID NO: 54856 - DNA, 15 bp, Homo sapiens
ggcagccaagataaa

SEQ ID NO: 54857 - DNA, 15 bp, Homo sapiens
gcagccaagataaat

SEQ ID NO: 54858 - DNA, 15 bp, Homo sapiens
cagccaagataaata

SEQ ID NO: 54859 - DNA, 15 bp, Homo sapiens
agccaagataaataa

SEQ ID NO: 54860 - DNA, 15 bp, Homo sapiens
gccaagataaataaa

SEQ ID NO: 54861 - DNA, 15 bp, Homo sapiens
ccaagataaataaaa

SEQ ID NO: 54862 - DNA, 15 bp, Homo sapiens
caagataaataaaaa

SEQ ID NO: 54863 - DNA, 15 bp, Homo sapiens
aagataaataaaaag

SEQ ID NO: 54864 - DNA, 15 bp, Homo sapiens
agataaataaaaagt

SEQ ID NO: 54865 - DNA, 15 bp, Homo sapiens
gataaataaaaagtc

SEQ ID NO: 54866 - DNA, 15 bp, Homo sapiens
ataaataaaaagtct

SEQ ID NO: 54867 - DNA, 15 bp, Homo sapiens
taaataaaaagtctt

SEQ ID NO: 54868 - DNA, 15 bp, Homo sapiens
aaataaaaagtcttc

SEQ ID NO: 54869 - DNA, 15 bp, Homo sapiens
aataaaaagtcttct

SEQ ID NO: 54870 - DNA, 15 bp, Homo sapiens
ataaaaagtcttctg

SEQ ID NO: 54871 - DNA, 15 bp, Homo sapiens
taaaaagtcttctgc

SEQ ID NO: 54872 - DNA, 15 bp, Homo sapiens
aaaaagtcttctgct

SEQ ID NO: 54873 - DNA, 15 bp, Homo sapiens
aaaagtcttctgctt

SEQ ID NO: 54874 - DNA, 15 bp, Homo sapiens
tttaaggcagcatgg

SEQ ID NO: 54875 - DNA, 15 bp, Homo sapiens
ttaaggcagcatggt

SEQ ID NO: 54876 - DNA, 15 bp, Homo sapiens
taaggcagcatggtc

SEQ ID NO: 54877 - DNA, 15 bp, Homo sapiens
aaggcagcatggtct

SEQ ID NO: 54878 - DNA, 15 bp, Homo sapiens
aggcagcatggtcta

SEQ ID NO: 54879 - DNA, 15 bp, Homo sapiens
ggcagcatggtctag

SEQ ID NO: 54880 - DNA, 15 bp, Homo sapiens
gcagcatggtctaga

SEQ ID NO: 54881 - DNA, 15 bp, Homo sapiens
cagcatggtctagag

SEQ ID NO: 54882 - DNA, 15 bp, Homo sapiens
agcatggtctagaga

SEQ ID NO: 54883 - DNA, 15 bp, Homo sapiens
gcatggtctagagag

SEQ ID NO: 54884 - DNA, 15 bp, Homo sapiens
catggtctagagagg

SEQ ID NO: 54885 - DNA, 15 bp, Homo sapiens
atggtctagagagga

SEQ ID NO: 54886 - DNA, 15 bp, Homo sapiens
tggtctagagaggaa

SEQ ID NO: 54887 - DNA, 15 bp, Homo sapiens
ggtctagagaggaac

SEQ ID NO: 54888 - DNA, 15 bp, Homo sapiens
gtctagagaggaaca

SEQ ID NO: 54889 - DNA, 15 bp, Homo sapiens
tctagagaggaacaa

SEQ ID NO: 54890 - DNA, 15 bp, Homo sapiens
ctagagaggaacaaa

SEQ ID NO: 54891 - DNA, 15 bp, Homo sapiens
tagagaggaacaaac

SEQ ID NO: 54892 - DNA, 15 bp, Homo sapiens
agagaggaacaaaca

SEQ ID NO: 54893 - DNA, 15 bp, Homo sapiens
gagaggaacaaacac

SEQ ID NO: 54894 - DNA, 15 bp, Homo sapiens
agaggaacaaacaca

SEQ ID NO: 54895 - DNA, 15 bp, Homo sapiens
gaggaacaaacacaa

SEQ ID NO: 54896 - DNA, 15 bp, Homo sapiens
aggaacaaacacaaa

SEQ ID NO: 54897 - DNA, 15 bp, Homo sapiens
ggaacaaacacaaat

SEQ ID NO: 54898 - DNA, 15 bp, Homo sapiens
gaacaaacacaaatt

SEQ ID NO: 54899 - DNA, 15 bp, Homo sapiens
aacaaacacaaattt

SEQ ID NO: 54900 - DNA, 15 bp, Homo sapiens
acaaacacaaatttc

SEQ ID NO: 54901 - DNA, 15 bp, Homo sapiens
caaacacaaatttcc

SEQ ID NO: 54902 - DNA, 15 bp, Homo sapiens
aaacacaaatttcct

SEQ ID NO: 54903 - DNA, 15 bp, Homo sapiens
aacacaaatttcctt

SEQ ID NO: 54904 - DNA, 15 bp, Homo sapiens
acacaaatttcctta

SEQ ID NO: 54905 - DNA, 15 bp, Homo sapiens
cacaaatttccttaa

SEQ ID NO: 54906 - DNA, 15 bp, Homo sapiens
acaaatttccttaaa

SEQ ID NO: 54907 - DNA, 15 bp, Homo sapiens
caaatttccttaaaa

SEQ ID NO: 54908 - DNA, 15 bp, Homo sapiens
aaatttccttaaaat

SEQ ID NO: 54909 - DNA, 15 bp, Homo sapiens
aatttccttaaaatt

SEQ ID NO: 54910 - DNA, 15 bp, Homo sapiens
atttccttaaaattt

SEQ ID NO: 54911 - DNA, 15 bp, Homo sapiens
tttccttaaaatttg

SEQ ID NO: 54912 - DNA, 15 bp, Homo sapiens
ttccttaaaatttga

SEQ ID NO: 54913 - DNA, 15 bp, Homo sapiens
tccttaaaatttgaa

SEQ ID NO: 54914 - DNA, 15 bp, Homo sapiens
ccttaaaatttgaag

SEQ ID NO: 54915 - DNA, 15 bp, Homo sapiens
cttaaaatttgaaga

SEQ ID NO: 54916 - DNA, 15 bp, Homo sapiens
ttaaaatttgaagaa

SEQ ID NO: 54917 - DNA, 15 bp, Homo sapiens
taaaatttgaagaaa

SEQ ID NO: 54918 - DNA, 15 bp, Homo sapiens
aaaatttgaagaaag

SEQ ID NO: 54919 - DNA, 15 bp, Homo sapiens
aaatttgaagaaaga

SEQ ID NO: 54920 - DNA, 15 bp, Homo sapiens
aatttgaagaaagac

SEQ ID NO: 54921 - DNA, 15 bp, Homo sapiens
atttgaagaaagact

SEQ ID NO: 54922 - DNA, 15 bp, Homo sapiens
tttgaagaaagactc

SEQ ID NO: 54923 - DNA, 15 bp, Homo sapiens
ttgaagaaagactct

SEQ ID NO: 54924 - DNA, 15 bp, Homo sapiens
tgaagaaagactctg

SEQ ID NO: 54925 - DNA, 15 bp, Homo sapiens
gaagaaagactctga

SEQ ID NO: 54926 - DNA, 15 bp, Homo sapiens
aagaaagactctgag

SEQ ID NO: 54927 - DNA, 15 bp, Homo sapiens
agaaagactctgagt

SEQ ID NO: 54928 - DNA, 15 bp, Homo sapiens
gaaagactctgagtt

SEQ ID NO: 54929 - DNA, 15 bp, Homo sapiens
aaagactctgagtta

SEQ ID NO: 54930 - DNA, 15 bp, Homo sapiens
aagactctgagttag

SEQ ID NO: 54931 - DNA, 15 bp, Homo sapiens
agactctgagttagt

SEQ ID NO: 54932 - DNA, 15 bp, Homo sapiens
gactctgagttagtc

SEQ ID NO: 54933 - DNA, 15 bp, Homo sapiens
actctgagttagtct

SEQ ID NO: 54934 - DNA, 15 bp, Homo sapiens
ctctgagttagtctt

SEQ ID NO: 54935 - DNA, 15 bp, Homo sapiens
tctgagttagtcttt

SEQ ID NO: 54936 - DNA, 15 bp, Homo sapiens
ctgagttagtcttta

SEQ ID NO: 54937 - DNA, 15 bp, Homo sapiens
tgagttagtctttac

SEQ ID NO: 54938 - DNA, 15 bp, Homo sapiens
gagttagtctttaca

SEQ ID NO: 54939 - DNA, 15 bp, Homo sapiens
agttagtctttacat

SEQ ID NO: 54940 - DNA, 15 bp, Homo sapiens
gttagtctttacatc

SEQ ID NO: 54941 - DNA, 15 bp, Homo sapiens
ttagtctttacatct

SEQ ID NO: 54942 - DNA, 15 bp, Homo sapiens
tagtctttacatctt

SEQ ID NO: 54943 - DNA, 15 bp, Homo sapiens
agtctttacatctta

SEQ ID NO: 54944 - DNA, 15 bp, Homo sapiens
gtctttacatcttac

SEQ ID NO: 54945 - DNA, 15 bp, Homo sapiens
tctttacatcttact

SEQ ID NO: 54946 - DNA, 15 bp, Homo sapiens
ctttacatcttactg

SEQ ID NO: 54947 - DNA, 15 bp, Homo sapiens
tttacatcttactgg

SEQ ID NO: 54948 - DNA, 15 bp, Homo sapiens
ttacatcttactggc

SEQ ID NO: 54949 - DNA, 15 bp, Homo sapiens
tacatcttactggca

SEQ ID NO: 54950 - DNA, 15 bp, Homo sapiens
acatcttactggcag

SEQ ID NO: 54951 - DNA, 15 bp, Homo sapiens
catcttactggcagt

SEQ ID NO: 54952 - DNA, 15 bp, Homo sapiens
atcttactggcagtg

SEQ ID NO: 54953 - DNA, 15 bp, Homo sapiens
tcttactggcagtgt

SEQ ID NO: 54954 - DNA, 15 bp, Homo sapiens
cttactggcagtgta

SEQ ID NO: 54955 - DNA, 15 bp, Homo sapiens
ttactggcagtgtag

SEQ ID NO: 54956 - DNA, 15 bp, Homo sapiens
tactggcagtgtagt

SEQ ID NO: 54957 - DNA, 15 bp, Homo sapiens
actggcagtgtagtg

SEQ ID NO: 54958 - DNA, 15 bp, Homo sapiens
ctggcagtgtagtgt

SEQ ID NO: 54959 - DNA, 15 bp, Homo sapiens
tggcagtgtagtgtt

SEQ ID NO: 54960 - DNA, 15 bp, Homo sapiens
ggcagtgtagtgtta

SEQ ID NO: 54961 - DNA, 15 bp, Homo sapiens
gcagtgtagtgttag

SEQ ID NO: 54962 - DNA, 15 bp, Homo sapiens
cagtgtagtgttaga

SEQ ID NO: 54963 - DNA, 15 bp, Homo sapiens
agtgtagtgttagat

SEQ ID NO: 54964 - DNA, 15 bp, Homo sapiens
gtgtagtgttagata

SEQ ID NO: 54965 - DNA, 15 bp, Homo sapiens
tgtagtgttagataa

SEQ ID NO: 54966 - DNA, 15 bp, Homo sapiens
gtagtgttagataat

SEQ ID NO: 54967 - DNA, 15 bp, Homo sapiens
tagtgttagataatt

SEQ ID NO: 54968 - DNA, 15 bp, Homo sapiens
agtgttagataattc

SEQ ID NO: 54969 - DNA, 15 bp, Homo sapiens
gtgttagataattct

SEQ ID NO: 54970 - DNA, 15 bp, Homo sapiens
tgttagataattctg

SEQ ID NO: 54971 - DNA, 15 bp, Homo sapiens
gttagataattctgc

SEQ ID NO: 54972 - DNA, 15 bp, Homo sapiens
ttagataattctgca

SEQ ID NO: 54973 - DNA, 15 bp, Homo sapiens
tagataattctgcac

SEQ ID NO: 54974 - DNA, 15 bp, Homo sapiens
agataattctgcacc

SEQ ID NO: 54975 - DNA, 15 bp, Homo sapiens
gataattctgcacct

SEQ ID NO: 54976 - DNA, 15 bp, Homo sapiens
ataattctgcacctt

SEQ ID NO: 54977 - DNA, 15 bp, Homo sapiens
taattctgcacctta

SEQ ID NO: 54978 - DNA, 15 bp, Homo sapiens
aattctgcaccttac

SEQ ID NO: 54979 - DNA, 15 bp, Homo sapiens
attctgcaccttact

SEQ ID NO: 54980 - DNA, 15 bp, Homo sapiens
ttctgcaccttactt

SEQ ID NO: 54981 - DNA, 15 bp, Homo sapiens
tctgcaccttacttt

SEQ ID NO: 54982 - DNA, 15 bp, Homo sapiens
ctgcaccttactttc

SEQ ID NO: 54983 - DNA, 15 bp, Homo sapiens
tgcaccttactttcc

SEQ ID NO: 54984 - DNA, 15 bp, Homo sapiens
gcaccttactttcct

SEQ ID NO: 54985 - DNA, 15 bp, Homo sapiens
caccttactttcctc

SEQ ID NO: 54986 - DNA, 15 bp, Homo sapiens
accttactttcctca

SEQ ID NO: 54987 - DNA, 15 bp, Homo sapiens
ccttactttcctcat

SEQ ID NO: 54988 - DNA, 15 bp, Homo sapiens
cttactttcctcatc

SEQ ID NO: 54989 - DNA, 15 bp, Homo sapiens
ttactttcctcatct

SEQ ID NO: 54990 - DNA, 15 bp, Homo sapiens
tactttcctcatctg

SEQ ID NO: 54991 - DNA, 15 bp, Homo sapiens
actttcctcatctgt

SEQ ID NO: 54992 - DNA, 15 bp, Homo sapiens
ctttcctcatctgta

SEQ ID NO: 54993 - DNA, 15 bp, Homo sapiens
tttcctcatctgtaa

SEQ ID NO: 54994 - DNA, 15 bp, Homo sapiens
ttcctcatctgtaaa

SEQ ID NO: 54995 - DNA, 15 bp, Homo sapiens
tcctcatctgtaaaa

SEQ ID NO: 54996 - DNA, 15 bp, Homo sapiens
cctcatctgtaaaag

SEQ ID NO: 54997 - DNA, 15 bp, Homo sapiens
ctcatctgtaaaagg

SEQ ID NO: 54998 - DNA, 15 bp, Homo sapiens
tcatctgtaaaaggt

SEQ ID NO: 54999 - DNA, 15 bp, Homo sapiens
catctgtaaaaggtg

SEQ ID NO: 55000 - DNA, 15 bp, Homo sapiens
atctgtaaaaggtga

SEQ ID NO: 55001 - DNA, 15 bp, Homo sapiens
tctgtaaaaggtgat

SEQ ID NO: 55002 - DNA, 15 bp, Homo sapiens
ctgtaaaaggtgatt

SEQ ID NO: 55003 - DNA, 15 bp, Homo sapiens
tgtaaaaggtgattg

SEQ ID NO: 55004 - DNA, 15 bp, Homo sapiens
gtaaaaggtgattgg

SEQ ID NO: 55005 - DNA, 15 bp, Homo sapiens
taaaaggtgattggt

SEQ ID NO: 55006 - DNA, 15 bp, Homo sapiens
aaaaggtgattggtg

SEQ ID NO: 55007 - DNA, 15 bp, Homo sapiens
aaaggtgattggtga

SEQ ID NO: 55008 - DNA, 15 bp, Homo sapiens
aaggtgattggtgat

SEQ ID NO: 55009 - DNA, 15 bp, Homo sapiens
aggtgattggtgatt

SEQ ID NO: 55010 - DNA, 15 bp, Homo sapiens
ggtgattggtgattc

SEQ ID NO: 55011 - DNA, 15 bp, Homo sapiens
gtgattggtgattcc

SEQ ID NO: 55012 - DNA, 15 bp, Homo sapiens
tgattggtgattcct

SEQ ID NO: 55013 - DNA, 15 bp, Homo sapiens
gattggtgattccta

SEQ ID NO: 55014 - DNA, 15 bp, Homo sapiens
attggtgattcctac

SEQ ID NO: 55015 - DNA, 15 bp, Homo sapiens
ttggtgattcctacc

SEQ ID NO: 55016 - DNA, 15 bp, Homo sapiens
tggtgattcctacct

SEQ ID NO: 55017 - DNA, 15 bp, Homo sapiens
ggtgattcctacctt

SEQ ID NO: 55018 - DNA, 15 bp, Homo sapiens
gtgattcctacctta

SEQ ID NO: 55019 - DNA, 15 bp, Homo sapiens
tgattcctaccttac

SEQ ID NO: 55020 - DNA, 15 bp, Homo sapiens
gattcctaccttaca

SEQ ID NO: 55021 - DNA, 15 bp, Homo sapiens
attcctaccttacat

SEQ ID NO: 55022 - DNA, 15 bp, Homo sapiens
ttcctaccttacatg

SEQ ID NO: 55023 - DNA, 15 bp, Homo sapiens
tcctaccttacatga

SEQ ID NO: 55024 - DNA, 15 bp, Homo sapiens
cctaccttacatgac

SEQ ID NO: 55025 - DNA, 15 bp, Homo sapiens
ctaccttacatgact

SEQ ID NO: 55026 - DNA, 15 bp, Homo sapiens
taccttacatgactg

SEQ ID NO: 55027 - DNA, 15 bp, Homo sapiens
accttacatgactga

SEQ ID NO: 55028 - DNA, 15 bp, Homo sapiens
ccttacatgactgat

SEQ ID NO: 55029 - DNA, 15 bp, Homo sapiens
cttacatgactgata

SEQ ID NO: 55030 - DNA, 15 bp, Homo sapiens
ttacatgactgataa

SEQ ID NO: 55031 - DNA, 15 bp, Homo sapiens
tacatgactgataag

SEQ ID NO: 55032 - DNA, 15 bp, Homo sapiens
acatgactgataagg

SEQ ID NO: 55033 - DNA, 15 bp, Homo sapiens
catgactgataagga

SEQ ID NO: 55034 - DNA, 15 bp, Homo sapiens
atgactgataaggaa

SEQ ID NO: 55035 - DNA, 15 bp, Homo sapiens
tgactgataaggaaa

SEQ ID NO: 55036 - DNA, 15 bp, Homo sapiens
gactgataaggaaat

SEQ ID NO: 55037 - DNA, 15 bp, Homo sapiens
actgataaggaaatc

SEQ ID NO: 55038 - DNA, 15 bp, Homo sapiens
ctgataaggaaatca

SEQ ID NO: 55039 - DNA, 15 bp, Homo sapiens
tgataaggaaatcaa

SEQ ID NO: 55040 - DNA, 15 bp, Homo sapiens
gataaggaaatcaaa

SEQ ID NO: 55041 - DNA, 15 bp, Homo sapiens
ataaggaaatcaaat

SEQ ID NO: 55042 - DNA, 15 bp, Homo sapiens
taaggaaatcaaatg

SEQ ID NO: 55043 - DNA, 15 bp, Homo sapiens
aaggaaatcaaatga

SEQ ID NO: 55044 - DNA, 15 bp, Homo sapiens
aggaaatcaaatgaa

SEQ ID NO: 55045 - DNA, 15 bp, Homo sapiens
ggaaatcaaatgaaa

SEQ ID NO: 55046 - DNA, 15 bp, Homo sapiens
gaaatcaaatgaaac

SEQ ID NO: 55047 - DNA, 15 bp, Homo sapiens
aaatcaaatgaaacc

SEQ ID NO: 55048 - DNA, 15 bp, Homo sapiens
aatcaaatgaaacct

SEQ ID NO: 55049 - DNA, 15 bp, Homo sapiens
atcaaatgaaaccta

SEQ ID NO: 55050 - DNA, 15 bp, Homo sapiens
tcaaatgaaacctat

SEQ ID NO: 55051 - DNA, 15 bp, Homo sapiens
caaatgaaacctata

SEQ ID NO: 55052 - DNA, 15 bp, Homo sapiens
aaatgaaacctatag

SEQ ID NO: 55053 - DNA, 15 bp, Homo sapiens
aatgaaacctataga

SEQ ID NO: 55054 - DNA, 15 bp, Homo sapiens
atgaaacctatagag

SEQ ID NO: 55055 - DNA, 15 bp, Homo sapiens
tgaaacctatagaga

SEQ ID NO: 55056 - DNA, 15 bp, Homo sapiens
gaaacctatagagag

SEQ ID NO: 55057 - DNA, 15 bp, Homo sapiens
aaacctatagagagc

SEQ ID NO: 55058 - DNA, 15 bp, Homo sapiens
aacctatagagagct

SEQ ID NO: 55059 - DNA, 15 bp, Homo sapiens
acctatagagagctg

SEQ ID NO: 55060 - DNA, 15 bp, Homo sapiens
cctatagagagctgt

SEQ ID NO: 55061 - DNA, 15 bp, Homo sapiens
ctatagagagctgtc

SEQ ID NO: 55062 - DNA, 15 bp, Homo sapiens
tatagagagctgtca

SEQ ID NO: 55063 - DNA, 15 bp, Homo sapiens
atagagagctgtcaa

SEQ ID NO: 55064 - DNA, 15 bp, Homo sapiens
tagagagctgtcaaa

SEQ ID NO: 55065 - DNA, 15 bp, Homo sapiens
agagagctgtcaaag

SEQ ID NO: 55066 - DNA, 15 bp, Homo sapiens
gagagctgtcaaagt

SEQ ID NO: 55067 - DNA, 15 bp, Homo sapiens
agagctgtcaaagta

SEQ ID NO: 55068 - DNA, 15 bp, Homo sapiens
gagctgtcaaagtac

SEQ ID NO: 55069 - DNA, 15 bp, Homo sapiens
agctgtcaaagtact

SEQ ID NO: 55070 - DNA, 15 bp, Homo sapiens
gctgtcaaagtacta

SEQ ID NO: 55071 - DNA, 15 bp, Homo sapiens
ctgtcaaagtactat

SEQ ID NO: 55072 - DNA, 15 bp, Homo sapiens
tgtcaaagtactata

SEQ ID NO: 55073 - DNA, 15 bp, Homo sapiens
gtcaaagtactatat

SEQ ID NO: 55074 - DNA, 15 bp, Homo sapiens
tcaaagtactatatg

SEQ ID NO: 55075 - DNA, 15 bp, Homo sapiens
caaagtactatatga

SEQ ID NO: 55076 - DNA, 15 bp, Homo sapiens
aaagtactatatgaa

SEQ ID NO: 55077 - DNA, 15 bp, Homo sapiens
aagtactatatgaat

SEQ ID NO: 55078 - DNA, 15 bp, Homo sapiens
agtactatatgaatc

SEQ ID NO: 55079 - DNA, 15 bp, Homo sapiens
gtactatatgaatct

SEQ ID NO: 55080 - DNA, 15 bp, Homo sapiens
tactatatgaatcta

SEQ ID NO: 55081 - DNA, 15 bp, Homo sapiens
actatatgaatctaa

SEQ ID NO: 55082 - DNA, 15 bp, Homo sapiens
ctatatgaatctaaa

SEQ ID NO: 55083 - DNA, 15 bp, Homo sapiens
tatatgaatctaaag

SEQ ID NO: 55084 - DNA, 15 bp, Homo sapiens
atatgaatctaaagt

SEQ ID NO: 55085 - DNA, 15 bp, Homo sapiens
tatgaatctaaagtg

SEQ ID NO: 55086 - DNA, 15 bp, Homo sapiens
atgaatctaaagtgt

SEQ ID NO: 55087 - DNA, 15 bp, Homo sapiens
tgaatctaaagtgtt

SEQ ID NO: 55088 - DNA, 15 bp, Homo sapiens
gaatctaaagtgtta

SEQ ID NO: 55089 - DNA, 15 bp, Homo sapiens
aatctaaagtgttat

SEQ ID NO: 55090 - DNA, 15 bp, Homo sapiens
atctaaagtgttatt

SEQ ID NO: 55091 - DNA, 15 bp, Homo sapiens
tctaaagtgttatta

SEQ ID NO: 55092 - DNA, 15 bp, Homo sapiens
ctaaagtgttattac

SEQ ID NO: 55093 - DNA, 15 bp, Homo sapiens
taaagtgttattact

SEQ ID NO: 55094 - DNA, 15 bp, Homo sapiens
aaagtgttattacta

SEQ ID NO: 55095 - DNA, 15 bp, Homo sapiens
aagtgttattactag

SEQ ID NO: 55096 - DNA, 15 bp, Homo sapiens
agtgttattactagg

SEQ ID NO: 55097 - DNA, 15 bp, Homo sapiens
gtgttattactagga

SEQ ID NO: 55098 - DNA, 15 bp, Homo sapiens
tgttattactaggaa

SEQ ID NO: 55099 - DNA, 15 bp, Homo sapiens
gttattactaggaaa

SEQ ID NO: 55100 - DNA, 15 bp, Homo sapiens
ttattactaggaaat

SEQ ID NO: 55101 - DNA, 15 bp, Homo sapiens
tattactaggaaata

SEQ ID NO: 55102 - DNA, 15 bp, Homo sapiens
attactaggaaatac

SEQ ID NO: 55103 - DNA, 15 bp, Homo sapiens
ttactaggaaataca

SEQ ID NO: 55104 - DNA, 15 bp, Homo sapiens
tactaggaaatacaa

SEQ ID NO: 55105 - DNA, 15 bp, Homo sapiens
actaggaaatacaaa

SEQ ID NO: 55106 - DNA, 15 bp, Homo sapiens
ctaggaaatacaaat

SEQ ID NO: 55107 - DNA, 15 bp, Homo sapiens
taggaaatacaaata

SEQ ID NO: 55108 - DNA, 15 bp, Homo sapiens
aggaaatacaaataa

SEQ ID NO: 55109 - DNA, 15 bp, Homo sapiens
ggaaatacaaataaa

SEQ ID NO: 55110 - DNA, 15 bp, Homo sapiens
gaaatacaaataaag

SEQ ID NO: 55111 - DNA, 15 bp, Homo sapiens
aaatacaaataaagt

SEQ ID NO: 55112 - DNA, 15 bp, Homo sapiens
aatacaaataaagtc

SEQ ID NO: 55113 - DNA, 15 bp, Homo sapiens
atacaaataaagtct

SEQ ID NO: 55114 - DNA, 15 bp, Homo sapiens
tacaaataaagtctg

SEQ ID NO: 55115 - DNA, 15 bp, Homo sapiens
acaaataaagtctgc

SEQ ID NO: 55116 - DNA, 15 bp, Homo sapiens
caaataaagtctgca

SEQ ID NO: 55117 - DNA, 15 bp, Homo sapiens
aaataaagtctgcac

SEQ ID NO: 55118 - DNA, 15 bp, Homo sapiens
aataaagtctgcact

SEQ ID NO: 55119 - DNA, 15 bp, Homo sapiens
ataaagtctgcacta

SEQ ID NO: 55120 - DNA, 15 bp, Homo sapiens
taaagtctgcactat

SEQ ID NO: 55121 - DNA, 15 bp, Homo sapiens
aaagtctgcactata

SEQ ID NO: 55122 - DNA, 15 bp, Homo sapiens
aagtctgcactatag

SEQ ID NO: 55123 - DNA, 15 bp, Homo sapiens
agtctgcactatagc

SEQ ID NO: 55124 - DNA, 15 bp, Homo sapiens
gtctgcactatagca

SEQ ID NO: 55125 - DNA, 15 bp, Homo sapiens
tctgcactatagcag

SEQ ID NO: 55126 - DNA, 15 bp, Homo sapiens
ctgcactatagcaga

SEQ ID NO: 55127 - DNA, 15 bp, Homo sapiens
tgcactatagcagaa

SEQ ID NO: 55128 - DNA, 15 bp, Homo sapiens
gcactatagcagaaa

SEQ ID NO: 55129 - DNA, 15 bp, Homo sapiens
cactatagcagaaaa

SEQ ID NO: 55130 - DNA, 15 bp, Homo sapiens
actatagcagaaaaa

SEQ ID NO: 55131 - DNA, 15 bp, Homo sapiens
ctatagcagaaaaat

SEQ ID NO: 55132 - DNA, 15 bp, Homo sapiens
tatagcagaaaaatc

SEQ ID NO: 55133 - DNA, 15 bp, Homo sapiens
atagcagaaaaatct

SEQ ID NO: 55134 - DNA, 15 bp, Homo sapiens
tagcagaaaaatctc

SEQ ID NO: 55135 - DNA, 15 bp, Homo sapiens
agcagaaaaatctct

SEQ ID NO: 55136 - DNA, 15 bp, Homo sapiens
gcagaaaaatctctt

SEQ ID NO: 55137 - DNA, 15 bp, Homo sapiens
cagaaaaatctctta

SEQ ID NO: 55138 - DNA, 15 bp, Homo sapiens
agaaaaatctcttat

SEQ ID NO: 55139 - DNA, 15 bp, Homo sapiens
gaaaaatctcttata

SEQ ID NO: 55140 - DNA, 15 bp, Homo sapiens
aaaaatctcttatag

SEQ ID NO: 55141 - DNA, 15 bp, Homo sapiens
aaaatctcttatagg

SEQ ID NO: 55142 - DNA, 15 bp, Homo sapiens
aaatctcttatagga

SEQ ID NO: 55143 - DNA, 15 bp, Homo sapiens
aatctcttataggat

SEQ ID NO: 55144 - DNA, 15 bp, Homo sapiens
atctcttataggatt

SEQ ID NO: 55145 - DNA, 15 bp, Homo sapiens
tctcttataggattg

SEQ ID NO: 55146 - DNA, 15 bp, Homo sapiens
ctcttataggattgt

SEQ ID NO: 55147 - DNA, 15 bp, Homo sapiens
tcttataggattgtt

SEQ ID NO: 55148 - DNA, 15 bp, Homo sapiens
cttataggattgttt

SEQ ID NO: 55149 - DNA, 15 bp, Homo sapiens
ttataggattgtttt

SEQ ID NO: 55150 - DNA, 15 bp, Homo sapiens
tataggattgtttta

SEQ ID NO: 55151 - DNA, 15 bp, Homo sapiens
ataggattgttttat

SEQ ID NO: 55152 - DNA, 15 bp, Homo sapiens
taggattgttttata

SEQ ID NO: 55153 - DNA, 15 bp, Homo sapiens
aggattgttttataa

SEQ ID NO: 55154 - DNA, 15 bp, Homo sapiens
ggattgttttataat

SEQ ID NO: 55155 - DNA, 15 bp, Homo sapiens
gattgttttataatg

SEQ ID NO: 55156 - DNA, 15 bp, Homo sapiens
attgttttataatgt

SEQ ID NO: 55157 - DNA, 15 bp, Homo sapiens
ttgttttataatgtt

SEQ ID NO: 55158 - DNA, 15 bp, Homo sapiens
tgttttataatgttg

SEQ ID NO: 55159 - DNA, 15 bp, Homo sapiens
gttttataatgttgg

SEQ ID NO: 55160 - DNA, 15 bp, Homo sapiens
ttttataatgttgga

SEQ ID NO: 55161 - DNA, 15 bp, Homo sapiens
tttataatgttggaa

SEQ ID NO: 55162 - DNA, 15 bp, Homo sapiens
ttataatgttggaaa

SEQ ID NO: 55163 - DNA, 15 bp, Homo sapiens
tataatgttggaaag

SEQ ID NO: 55164 - DNA, 15 bp, Homo sapiens
ataatgttggaaaga

SEQ ID NO: 55165 - DNA, 15 bp, Homo sapiens
taatgttggaaagaa

SEQ ID NO: 55166 - DNA, 15 bp, Homo sapiens
aatgttggaaagaaa

SEQ ID NO: 55167 - DNA, 15 bp, Homo sapiens
atgttggaaagaaag

SEQ ID NO: 55168 - DNA, 15 bp, Homo sapiens
tgttggaaagaaagc

SEQ ID NO: 55169 - DNA, 15 bp, Homo sapiens
gttggaaagaaagca

SEQ ID NO: 55170 - DNA, 15 bp, Homo sapiens
ttggaaagaaagcag

SEQ ID NO: 55171 - DNA, 15 bp, Homo sapiens
tggaaagaaagcaga

SEQ ID NO: 55172 - DNA, 15 bp, Homo sapiens
ggaaagaaagcagaa

SEQ ID NO: 55173 - DNA, 15 bp, Homo sapiens
gaaagaaagcagaaa

SEQ ID NO: 55174 - DNA, 15 bp, Homo sapiens
aaagaaagcagaaaa

SEQ ID NO: 55175 - DNA, 15 bp, Homo sapiens
aagaaagcagaaaaa

SEQ ID NO: 55176 - DNA, 15 bp, Homo sapiens
agaaagcagaaaaaa

SEQ ID NO: 55177 - DNA, 15 bp, Homo sapiens
gaaagcagaaaaaaa

SEQ ID NO: 55178 - DNA, 15 bp, Homo sapiens
aaagcagaaaaaaaa

SEQ ID NO: 55179 - DNA, 15 bp, Homo sapiens
aagcagaaaaaaaat

SEQ ID NO: 55180 - DNA, 15 bp, Homo sapiens
agcagaaaaaaaatc

SEQ ID NO: 55181 - DNA, 15 bp, Homo sapiens
gcagaaaaaaaatcc

SEQ ID NO: 55182 - DNA, 15 bp, Homo sapiens
cagaaaaaaaatcca

SEQ ID NO: 55183 - DNA, 15 bp, Homo sapiens
agaaaaaaaatccac

SEQ ID NO: 55184 - DNA, 15 bp, Homo sapiens
gaaaaaaaatccacc

SEQ ID NO: 55185 - DNA, 15 bp, Homo sapiens
aaaaaaaatccacct

SEQ ID NO: 55186 - DNA, 15 bp, Homo sapiens
aaaaaaatccacctg

SEQ ID NO: 55187 - DNA, 15 bp, Homo sapiens
aaaaaatccacctga

SEQ ID NO: 55188 - DNA, 15 bp, Homo sapiens
aaaaatccacctgaa

SEQ ID NO: 55189 - DNA, 15 bp, Homo sapiens
aaaatccacctgaat

SEQ ID NO: 55190 - DNA, 15 bp, Homo sapiens
aaatccacctgaatt

SEQ ID NO: 55191 - DNA, 15 bp, Homo sapiens
aatccacctgaattt

SEQ ID NO: 55192 - DNA, 15 bp, Homo sapiens
atccacctgaatttt

SEQ ID NO: 55193 - DNA, 15 bp, Homo sapiens
tccacctgaattttt

SEQ ID NO: 55194 - DNA, 15 bp, Homo sapiens
ccacctgaattttta

SEQ ID NO: 55195 - DNA, 15 bp, Homo sapiens
cacctgaatttttaa

SEQ ID NO: 55196 - DNA, 15 bp, Homo sapiens
acctgaatttttaaa

SEQ ID NO: 55197 - DNA, 15 bp, Homo sapiens
cctgaatttttaaaa

SEQ ID NO: 55198 - DNA, 15 bp, Homo sapiens
ctgaatttttaaaaa

SEQ ID NO: 55199 - DNA, 15 bp, Homo sapiens
tgaatttttaaaaag

SEQ ID NO: 55200 - DNA, 15 bp, Homo sapiens
gaatttttaaaaagt

SEQ ID NO: 55201 - DNA, 15 bp, Homo sapiens
aatttttaaaaagtc

SEQ ID NO: 55202 - DNA, 15 bp, Homo sapiens
atttttaaaaagtca

SEQ ID NO: 55203 - DNA, 15 bp, Homo sapiens
tttttaaaaagtcag

SEQ ID NO: 55204 - DNA, 15 bp, Homo sapiens
ttttaaaaagtcaga

SEQ ID NO: 55205 - DNA, 15 bp, Homo sapiens
tttaaaaagtcagaa

SEQ ID NO: 55206 - DNA, 15 bp, Homo sapiens
ttaaaaagtcagaat

SEQ ID NO: 55207 - DNA, 15 bp, Homo sapiens
taaaaagtcagaatg

SEQ ID NO: 55208 - DNA, 15 bp, Homo sapiens
aaaaagtcagaatga

SEQ ID NO: 55209 - DNA, 15 bp, Homo sapiens
aaaagtcagaatgaa

SEQ ID NO: 55210 - DNA, 15 bp, Homo sapiens
aaagtcagaatgaat

SEQ ID NO: 55211 - DNA, 15 bp, Homo sapiens
aagtcagaatgaata

SEQ ID NO: 55212 - DNA, 15 bp, Homo sapiens
agtcagaatgaatac

SEQ ID NO: 55213 - DNA, 15 bp, Homo sapiens
gtcagaatgaatact

SEQ ID NO: 55214 - DNA, 15 bp, Homo sapiens
tcagaatgaatactc

SEQ ID NO: 55215 - DNA, 15 bp, Homo sapiens
cagaatgaatactcc

SEQ ID NO: 55216 - DNA, 15 bp, Homo sapiens
agaatgaatactcca

SEQ ID NO: 55217 - DNA, 15 bp, Homo sapiens
gaatgaatactccaa

SEQ ID NO: 55218 - DNA, 15 bp, Homo sapiens
aatgaatactccaaa

SEQ ID NO: 55219 - DNA, 15 bp, Homo sapiens
atgaatactccaaaa

SEQ ID NO: 55220 - DNA, 15 bp, Homo sapiens
tgaatactccaaaaa

SEQ ID NO: 55221 - DNA, 15 bp, Homo sapiens
gaatactccaaaaat

SEQ ID NO: 55222 - DNA, 15 bp, Homo sapiens
aatactccaaaaatt

SEQ ID NO: 55223 - DNA, 15 bp, Homo sapiens
atactccaaaaattg

SEQ ID NO: 55224 - DNA, 15 bp, Homo sapiens
tactccaaaaattgc

SEQ ID NO: 55225 - DNA, 15 bp, Homo sapiens
actccaaaaattgcc

SEQ ID NO: 55226 - DNA, 15 bp, Homo sapiens
ctccaaaaattgcca

SEQ ID NO: 55227 - DNA, 15 bp, Homo sapiens
tccaaaaattgccaa

SEQ ID NO: 55228 - DNA, 15 bp, Homo sapiens
ccaaaaattgccaaa

SEQ ID NO: 55229 - DNA, 15 bp, Homo sapiens
caaaaattgccaaat

SEQ ID NO: 55230 - DNA, 15 bp, Homo sapiens
aaaaattgccaaatg

SEQ ID NO: 55231 - DNA, 15 bp, Homo sapiens
aaaattgccaaatga

SEQ ID NO: 55232 - DNA, 15 bp, Homo sapiens
aaattgccaaatgag

SEQ ID NO: 55233 - DNA, 15 bp, Homo sapiens
aattgccaaatgaga

SEQ ID NO: 55234 - DNA, 15 bp, Homo sapiens
attgccaaatgagat

SEQ ID NO: 55235 - DNA, 15 bp, Homo sapiens
ttgccaaatgagatt

SEQ ID NO: 55236 - DNA, 15 bp, Homo sapiens
tgccaaatgagatta

SEQ ID NO: 55237 - DNA, 15 bp, Homo sapiens
gccaaatgagattag

SEQ ID NO: 55238 - DNA, 15 bp, Homo sapiens
ccaaatgagattaga

SEQ ID NO: 55239 - DNA, 15 bp, Homo sapiens
caaatgagattagag

SEQ ID NO: 55240 - DNA, 15 bp, Homo sapiens
aaatgagattagagg

SEQ ID NO: 55241 - DNA, 15 bp, Homo sapiens
aatgagattagaggc

SEQ ID NO: 55242 - DNA, 15 bp, Homo sapiens
atgagattagaggca

SEQ ID NO: 55243 - DNA, 15 bp, Homo sapiens
tgagattagaggcag

SEQ ID NO: 55244 - DNA, 15 bp, Homo sapiens
gagattagaggcagg

SEQ ID NO: 55245 - DNA, 15 bp, Homo sapiens
agattagaggcaggg

SEQ ID NO: 55246 - DNA, 15 bp, Homo sapiens
gattagaggcagggt

SEQ ID NO: 55247 - DNA, 15 bp, Homo sapiens
attagaggcagggtt

SEQ ID NO: 55248 - DNA, 15 bp, Homo sapiens
ttagaggcagggtta

SEQ ID NO: 55249 - DNA, 15 bp, Homo sapiens
tagaggcagggttaa

SEQ ID NO: 55250 - DNA, 15 bp, Homo sapiens
agaggcagggttaaa

SEQ ID NO: 55251 - DNA, 15 bp, Homo sapiens
gaggcagggttaaag

SEQ ID NO: 55252 - DNA, 15 bp, Homo sapiens
aggcagggttaaaga

SEQ ID NO: 55253 - DNA, 15 bp, Homo sapiens
ggcagggttaaagaa

SEQ ID NO: 55254 - DNA, 15 bp, Homo sapiens
gcagggttaaagaat

SEQ ID NO: 55255 - DNA, 15 bp, Homo sapiens
cagggttaaagaatt

SEQ ID NO: 55256 - DNA, 15 bp, Homo sapiens
agggttaaagaattc

SEQ ID NO: 55257 - DNA, 15 bp, Homo sapiens
gggttaaagaattca

SEQ ID NO: 55258 - DNA, 15 bp, Homo sapiens
ggttaaagaattcat

SEQ ID NO: 55259 - DNA, 15 bp, Homo sapiens
gttaaagaattcatc

SEQ ID NO: 55260 - DNA, 15 bp, Homo sapiens
ttaaagaattcatcc

SEQ ID NO: 55261 - DNA, 15 bp, Homo sapiens
taaagaattcatcct

SEQ ID NO: 55262 - DNA, 15 bp, Homo sapiens
aaagaattcatcctt

SEQ ID NO: 55263 - DNA, 15 bp, Homo sapiens
aagaattcatccttc

SEQ ID NO: 55264 - DNA, 15 bp, Homo sapiens
agaattcatccttcc

SEQ ID NO: 55265 - DNA, 15 bp, Homo sapiens
gaattcatccttccc

SEQ ID NO: 55266 - DNA, 15 bp, Homo sapiens
aattcatccttccct

SEQ ID NO: 55267 - DNA, 15 bp, Homo sapiens
attcatccttccctc

SEQ ID NO: 55268 - DNA, 15 bp, Homo sapiens
ttcatccttccctct

SEQ ID NO: 55269 - DNA, 15 bp, Homo sapiens
tcatccttccctctc

SEQ ID NO: 55270 - DNA, 15 bp, Homo sapiens
catccttccctctct

SEQ ID NO: 55271 - DNA, 15 bp, Homo sapiens
atccttccctctctg

SEQ ID NO: 55272 - DNA, 15 bp, Homo sapiens
tccttccctctctgc

SEQ ID NO: 55273 - DNA, 15 bp, Homo sapiens
ccttccctctctgca

SEQ ID NO: 55274 - DNA, 15 bp, Homo sapiens
cttccctctctgcac

SEQ ID NO: 55275 - DNA, 15 bp, Homo sapiens
ttccctctctgcacc

SEQ ID NO: 55276 - DNA, 15 bp, Homo sapiens
tccctctctgcacca

SEQ ID NO: 55277 - DNA, 15 bp, Homo sapiens
ccctctctgcaccat

SEQ ID NO: 55278 - DNA, 15 bp, Homo sapiens
cctctctgcaccata

SEQ ID NO: 55279 - DNA, 15 bp, Homo sapiens
ctctctgcaccatag

SEQ ID NO: 55280 - DNA, 15 bp, Homo sapiens
tctctgcaccatagt

SEQ ID NO: 55281 - DNA, 15 bp, Homo sapiens
ctctgcaccatagtg

SEQ ID NO: 55282 - DNA, 15 bp, Homo sapiens
tctgcaccatagtgt

SEQ ID NO: 55283 - DNA, 15 bp, Homo sapiens
ctgcaccatagtgtt

SEQ ID NO: 55284 - DNA, 15 bp, Homo sapiens
tgcaccatagtgttt

SEQ ID NO: 55285 - DNA, 15 bp, Homo sapiens
gcaccatagtgtttt

SEQ ID NO: 55286 - DNA, 15 bp, Homo sapiens
caccatagtgtttta

SEQ ID NO: 55287 - DNA, 15 bp, Homo sapiens
accatagtgttttaa

SEQ ID NO: 55288 - DNA, 15 bp, Homo sapiens
ccatagtgttttaag

SEQ ID NO: 55289 - DNA, 15 bp, Homo sapiens
catagtgttttaagg

SEQ ID NO: 55290 - DNA, 15 bp, Homo sapiens
atagtgttttaaggg

SEQ ID NO: 55291 - DNA, 15 bp, Homo sapiens
tagtgttttaagggt

SEQ ID NO: 55292 - DNA, 15 bp, Homo sapiens
agtgttttaagggta

SEQ ID NO: 55293 - DNA, 15 bp, Homo sapiens
gtgttttaagggtat

SEQ ID NO: 55294 - DNA, 15 bp, Homo sapiens
tgttttaagggtatt

SEQ ID NO: 55295 - DNA, 15 bp, Homo sapiens
gttttaagggtatta

SEQ ID NO: 55296 - DNA, 15 bp, Homo sapiens
ttttaagggtattaa

SEQ ID NO: 55297 - DNA, 15 bp, Homo sapiens
tttaagggtattaat

SEQ ID NO: 55298 - DNA, 15 bp, Homo sapiens
ttaagggtattaatc

SEQ ID NO: 55299 - DNA, 15 bp, Homo sapiens
taagggtattaatct

SEQ ID NO: 55300 - DNA, 15 bp, Homo sapiens
aagggtattaatctt

SEQ ID NO: 55301 - DNA, 15 bp, Homo sapiens
agggtattaatcttt

SEQ ID NO: 55302 - DNA, 15 bp, Homo sapiens
gggtattaatcttta

SEQ ID NO: 55303 - DNA, 15 bp, Homo sapiens
ggtattaatctttat

SEQ ID NO: 55304 - DNA, 15 bp, Homo sapiens
gtattaatctttatg

SEQ ID NO: 55305 - DNA, 15 bp, Homo sapiens
tattaatctttatga

SEQ ID NO: 55306 - DNA, 15 bp, Homo sapiens
attaatctttatgaa

SEQ ID NO: 55307 - DNA, 15 bp, Homo sapiens
ttaatctttatgaaa

SEQ ID NO: 55308 - DNA, 15 bp, Homo sapiens
taatctttatgaaac

SEQ ID NO: 55309 - DNA, 15 bp, Homo sapiens
aatctttatgaaaca

SEQ ID NO: 55310 - DNA, 15 bp, Homo sapiens
atctttatgaaacac

SEQ ID NO: 55311 - DNA, 15 bp, Homo sapiens
tctttatgaaacacg

SEQ ID NO: 55312 - DNA, 15 bp, Homo sapiens
ctttatgaaacacgt

SEQ ID NO: 55313 - DNA, 15 bp, Homo sapiens
tttatgaaacacgtg

SEQ ID NO: 55314 - DNA, 15 bp, Homo sapiens
ttatgaaacacgtgt

SEQ ID NO: 55315 - DNA, 15 bp, Homo sapiens
tatgaaacacgtgta

SEQ ID NO: 55316 - DNA, 15 bp, Homo sapiens
atgaaacacgtgtat

SEQ ID NO: 55317 - DNA, 15 bp, Homo sapiens
tgaaacacgtgtatc

SEQ ID NO: 55318 - DNA, 15 bp, Homo sapiens
gaaacacgtgtatct

SEQ ID NO: 55319 - DNA, 15 bp, Homo sapiens
aaacacgtgtatctt

SEQ ID NO: 55320 - DNA, 15 bp, Homo sapiens
aacacgtgtatcttt

SEQ ID NO: 55321 - DNA, 15 bp, Homo sapiens
acacgtgtatctttc

SEQ ID NO: 55322 - DNA, 15 bp, Homo sapiens
cacgtgtatctttct

SEQ ID NO: 55323 - DNA, 15 bp, Homo sapiens
acgtgtatctttctc

SEQ ID NO: 55324 - DNA, 15 bp, Homo sapiens
cgtgtatctttctca

SEQ ID NO: 55325 - DNA, 15 bp, Homo sapiens
gtgtatctttctcaa

SEQ ID NO: 55326 - DNA, 15 bp, Homo sapiens
tgtatctttctcaaa

SEQ ID NO: 55327 - DNA, 15 bp, Homo sapiens
gtatctttctcaaaa

SEQ ID NO: 55328 - DNA, 15 bp, Homo sapiens
tatctttctcaaaag

SEQ ID NO: 55329 - DNA, 15 bp, Homo sapiens
atctttctcaaaaga

SEQ ID NO: 55330 - DNA, 15 bp, Homo sapiens
tctttctcaaaagac

SEQ ID NO: 55331 - DNA, 15 bp, Homo sapiens
ctttctcaaaagaca

SEQ ID NO: 55332 - DNA, 15 bp, Homo sapiens
tttctcaaaagacac

SEQ ID NO: 55333 - DNA, 15 bp, Homo sapiens
ttctcaaaagacact

SEQ ID NO: 55334 - DNA, 15 bp, Homo sapiens
tctcaaaagacactt

SEQ ID NO: 55335 - DNA, 15 bp, Homo sapiens
ctcaaaagacacttg

SEQ ID NO: 55336 - DNA, 15 bp, Homo sapiens
tcaaaagacacttgt

SEQ ID NO: 55337 - DNA, 15 bp, Homo sapiens
caaaagacacttgtt

SEQ ID NO: 55338 - DNA, 15 bp, Homo sapiens
aaaagacacttgtta

SEQ ID NO: 55339 - DNA, 15 bp, Homo sapiens
aaagacacttgttaa

SEQ ID NO: 55340 - DNA, 15 bp, Homo sapiens
aagacacttgttaaa

SEQ ID NO: 55341 - DNA, 15 bp, Homo sapiens
agacacttgttaaag

SEQ ID NO: 55342 - DNA, 15 bp, Homo sapiens
gacacttgttaaagc

SEQ ID NO: 55343 - DNA, 15 bp, Homo sapiens
acacttgttaaagca

SEQ ID NO: 55344 - DNA, 15 bp, Homo sapiens
cacttgttaaagcag

SEQ ID NO: 55345 - DNA, 15 bp, Homo sapiens
acttgttaaagcagc

SEQ ID NO: 55346 - DNA, 15 bp, Homo sapiens
cttgttaaagcagca

SEQ ID NO: 55347 - DNA, 15 bp, Homo sapiens
ttgttaaagcagcag

SEQ ID NO: 55348 - DNA, 15 bp, Homo sapiens
tgttaaagcagcagc

SEQ ID NO: 55349 - DNA, 15 bp, Homo sapiens
gttaaagcagcagct

SEQ ID NO: 55350 - DNA, 15 bp, Homo sapiens
ttaaagcagcagctc

SEQ ID NO: 55351 - DNA, 15 bp, Homo sapiens
taaagcagcagctct

SEQ ID NO: 55352 - DNA, 15 bp, Homo sapiens
aaagcagcagctcta

SEQ ID NO: 55353 - DNA, 15 bp, Homo sapiens
aagcagcagctctac

SEQ ID NO: 55354 - DNA, 15 bp, Homo sapiens
agcagcagctctaca

SEQ ID NO: 55355 - DNA, 15 bp, Homo sapiens
gcagcagctctacat

SEQ ID NO: 55356 - DNA, 15 bp, Homo sapiens
cagcagctctacatt

SEQ ID NO: 55357 - DNA, 15 bp, Homo sapiens
agcagctctacattc

SEQ ID NO: 55358 - DNA, 15 bp, Homo sapiens
gcagctctacattcc

SEQ ID NO: 55359 - DNA, 15 bp, Homo sapiens
cagctctacattcca

SEQ ID NO: 55360 - DNA, 15 bp, Homo sapiens
agctctacattccaa

SEQ ID NO: 55361 - DNA, 15 bp, Homo sapiens
gctctacattccaaa

SEQ ID NO: 55362 - DNA, 15 bp, Homo sapiens
ctctacattccaaag

SEQ ID NO: 55363 - DNA, 15 bp, Homo sapiens
tctacattccaaagt

SEQ ID NO: 55364 - DNA, 15 bp, Homo sapiens
ctacattccaaagta

SEQ ID NO: 55365 - DNA, 15 bp, Homo sapiens
tacattccaaagtaa

SEQ ID NO: 55366 - DNA, 15 bp, Homo sapiens
acattccaaagtaaa

SEQ ID NO: 55367 - DNA, 15 bp, Homo sapiens
cattccaaagtaaaa

SEQ ID NO: 55368 - DNA, 15 bp, Homo sapiens
attccaaagtaaaag

SEQ ID NO: 55369 - DNA, 15 bp, Homo sapiens
ttccaaagtaaaaga

SEQ ID NO: 55370 - DNA, 15 bp, Homo sapiens
tccaaagtaaaagag

SEQ ID NO: 55371 - DNA, 15 bp, Homo sapiens
ccaaagtaaaagagg

SEQ ID NO: 55372 - DNA, 15 bp, Homo sapiens
caaagtaaaagagga

SEQ ID NO: 55373 - DNA, 15 bp, Homo sapiens
aaagtaaaagaggaa

SEQ ID NO: 55374 - DNA, 15 bp, Homo sapiens
aagtaaaagaggaaa

SEQ ID NO: 55375 - DNA, 15 bp, Homo sapiens
agtaaaagaggaaag

SEQ ID NO: 55376 - DNA, 15 bp, Homo sapiens
gtaaaagaggaaaga

SEQ ID NO: 55377 - DNA, 15 bp, Homo sapiens
taaaagaggaaagat

SEQ ID NO: 55378 - DNA, 15 bp, Homo sapiens
aaaagaggaaagatg

SEQ ID NO: 55379 - DNA, 15 bp, Homo sapiens
aaagaggaaagatgt

SEQ ID NO: 55380 - DNA, 15 bp, Homo sapiens
aagaggaaagatgtc

SEQ ID NO: 55381 - DNA, 15 bp, Homo sapiens
agaggaaagatgtca

SEQ ID NO: 55382 - DNA, 15 bp, Homo sapiens
gaggaaagatgtcat

SEQ ID NO: 55383 - DNA, 15 bp, Homo sapiens
aggaaagatgtcata

SEQ ID NO: 55384 - DNA, 15 bp, Homo sapiens
ggaaagatgtcatat

SEQ ID NO: 55385 - DNA, 15 bp, Homo sapiens
gaaagatgtcatatt

SEQ ID NO: 55386 - DNA, 15 bp, Homo sapiens
aagatgtcatatttt

SEQ ID NO: 55387 - DNA, 15 bp, Homo sapiens
agatgtcatattttt

SEQ ID NO: 55388 - DNA, 15 bp, Homo sapiens
gatgtcatatttttg

SEQ ID NO: 55389 - DNA, 15 bp, Homo sapiens
atgtcatatttttga

SEQ ID NO: 55390 - DNA, 15 bp, Homo sapiens
tgtcatatttttgaa

SEQ ID NO: 55391 - DNA, 15 bp, Homo sapiens
gtcatatttttgaaa

SEQ ID NO: 55392 - DNA, 15 bp, Homo sapiens
tcatatttttgaaat

SEQ ID NO: 55393 - DNA, 15 bp, Homo sapiens
catatttttgaaatt

SEQ ID NO: 55394 - DNA, 15 bp, Homo sapiens
atatttttgaaatta

SEQ ID NO: 55395 - DNA, 15 bp, Homo sapiens
tatttttgaaattat

SEQ ID NO: 55396 - DNA, 15 bp, Homo sapiens
atttttgaaattata

SEQ ID NO: 55397 - DNA, 15 bp, Homo sapiens
tttttgaaattataa

SEQ ID NO: 55398 - DNA, 15 bp, Homo sapiens
ttttgaaattataat

SEQ ID NO: 55399 - DNA, 15 bp, Homo sapiens
tttgaaattataatc

SEQ ID NO: 55400 - DNA, 15 bp, Homo sapiens
ttgaaattataatca

SEQ ID NO: 55401 - DNA, 15 bp, Homo sapiens
tgaaattataatcac

SEQ ID NO: 55402 - DNA, 15 bp, Homo sapiens
gaaattataatcacc

SEQ ID NO: 55403 - DNA, 15 bp, Homo sapiens
aaattataatcacct

SEQ ID NO: 55404 - DNA, 15 bp, Homo sapiens
aattataatcacctt

SEQ ID NO: 55405 - DNA, 15 bp, Homo sapiens
attataatcaccttt

SEQ ID NO: 55406 - DNA, 15 bp, Homo sapiens
ttataatcaccttta

SEQ ID NO: 55407 - DNA, 15 bp, Homo sapiens
tataatcacctttaa

SEQ ID NO: 55408 - DNA, 15 bp, Homo sapiens
ataatcacctttaag

SEQ ID NO: 55409 - DNA, 15 bp, Homo sapiens
taatcacctttaagc

SEQ ID NO: 55410 - DNA, 15 bp, Homo sapiens
aatcacctttaagcc

SEQ ID NO: 55411 - DNA, 15 bp, Homo sapiens
atcacctttaagcca

SEQ ID NO: 55412 - DNA, 15 bp, Homo sapiens
tcacctttaagccaa

SEQ ID NO: 55413 - DNA, 15 bp, Homo sapiens
cacctttaagccaaa

SEQ ID NO: 55414 - DNA, 15 bp, Homo sapiens
acctttaagccaaaa

SEQ ID NO: 55415 - DNA, 15 bp, Homo sapiens
cctttaagccaaaaa

SEQ ID NO: 55416 - DNA, 15 bp, Homo sapiens
ctttaagccaaaaag

SEQ ID NO: 55417 - DNA, 15 bp, Homo sapiens
tttaagccaaaaagg

SEQ ID NO: 55418 - DNA, 15 bp, Homo sapiens
ttaagccaaaaaggg

SEQ ID NO: 55419 - DNA, 15 bp, Homo sapiens
taagccaaaaagggg

SEQ ID NO: 55420 - DNA, 15 bp, Homo sapiens
aagccaaaaagggga

SEQ ID NO: 55421 - DNA, 15 bp, Homo sapiens
agccaaaaaggggaa

SEQ ID NO: 55422 - DNA, 15 bp, Homo sapiens
gccaaaaaggggaaa

SEQ ID NO: 55423 - DNA, 15 bp, Homo sapiens
ccaaaaaggggaaaa

SEQ ID NO: 55424 - DNA, 15 bp, Homo sapiens
caaaaaggggaaaaa

SEQ ID NO: 55425 - DNA, 15 bp, Homo sapiens
aaaaaggggaaaaat

SEQ ID NO: 55426 - DNA, 15 bp, Homo sapiens
aaaaggggaaaaatt

SEQ ID NO: 55427 - DNA, 15 bp, Homo sapiens
aaaggggaaaaattt

SEQ ID NO: 55428 - DNA, 15 bp, Homo sapiens
aaggggaaaaatttt

SEQ ID NO: 55429 - DNA, 15 bp, Homo sapiens
aggggaaaaattttt

SEQ ID NO: 55430 - DNA, 15 bp, Homo sapiens
ggggaaaaatttttt

SEQ ID NO: 55431 - DNA, 15 bp, Homo sapiens
gggaaaaattttttt

SEQ ID NO: 55432 - DNA, 15 bp, Homo sapiens
ggaaaaatttttttg

SEQ ID NO: 55433 - DNA, 15 bp, Homo sapiens
gaaaaatttttttgt

SEQ ID NO: 55434 - DNA, 15 bp, Homo sapiens
aaaaatttttttgtt

SEQ ID NO: 55435 - DNA, 15 bp, Homo sapiens
aaaatttttttgttg

SEQ ID NO: 55436 - DNA, 15 bp, Homo sapiens
aaatttttttgttga

SEQ ID NO: 55437 - DNA, 15 bp, Homo sapiens
aatttttttgttgaa

SEQ ID NO: 55438 - DNA, 15 bp, Homo sapiens
atttttttgttgaaa

SEQ ID NO: 55439 - DNA, 15 bp, Homo sapiens
tttttttgttgaaaa

SEQ ID NO: 55440 - DNA, 15 bp, Homo sapiens
ttttttgttgaaaaa

SEQ ID NO: 55441 - DNA, 15 bp, Homo sapiens
tttttgttgaaaaat

SEQ ID NO: 55442 - DNA, 15 bp, Homo sapiens
ttttgttgaaaaatt

SEQ ID NO: 55443 - DNA, 15 bp, Homo sapiens
tttgttgaaaaattt

SEQ ID NO: 55444 - DNA, 15 bp, Homo sapiens
ttgttgaaaaattta

SEQ ID NO: 55445 - DNA, 15 bp, Homo sapiens
tgttgaaaaatttaa

SEQ ID NO: 55446 - DNA, 15 bp, Homo sapiens
gttgaaaaatttaat

SEQ ID NO: 55447 - DNA, 15 bp, Homo sapiens
ttgaaaaatttaatc

SEQ ID NO: 55448 - DNA, 15 bp, Homo sapiens
tgaaaaatttaatct

SEQ ID NO: 55449 - DNA, 15 bp, Homo sapiens
gaaaaatttaatctt

SEQ ID NO: 55450 - DNA, 15 bp, Homo sapiens
aaaaatttaatcttt

SEQ ID NO: 55451 - DNA, 15 bp, Homo sapiens
aaaatttaatctttc

SEQ ID NO: 55452 - DNA, 15 bp, Homo sapiens
aaatttaatctttct

SEQ ID NO: 55453 - DNA, 15 bp, Homo sapiens
aatttaatctttctt

SEQ ID NO: 55454 - DNA, 15 bp, Homo sapiens
atttaatctttcttt

SEQ ID NO: 55455 - DNA, 15 bp, Homo sapiens
tttaatctttcttta

SEQ ID NO: 55456 - DNA, 15 bp, Homo sapiens
ttaatctttctttaa

SEQ ID NO: 55457 - DNA, 15 bp, Homo sapiens
taatctttctttaag

SEQ ID NO: 55458 - DNA, 15 bp, Homo sapiens
aatctttctttaaga

SEQ ID NO: 55459 - DNA, 15 bp, Homo sapiens
atctttctttaagac

SEQ ID NO: 55460 - DNA, 15 bp, Homo sapiens
tctttctttaagacc

SEQ ID NO: 55461 - DNA, 15 bp, Homo sapiens
ctttctttaagacct

SEQ ID NO: 55462 - DNA, 15 bp, Homo sapiens
tttctttaagacctc

SEQ ID NO: 55463 - DNA, 15 bp, Homo sapiens
ttctttaagacctct

SEQ ID NO: 55464 - DNA, 15 bp, Homo sapiens
tctttaagacctcta

SEQ ID NO: 55465 - DNA, 15 bp, Homo sapiens
ctttaagacctctat

SEQ ID NO: 55466 - DNA, 15 bp, Homo sapiens
tttaagacctctatt

SEQ ID NO: 55467 - DNA, 15 bp, Homo sapiens
ttaagacctctattt

SEQ ID NO: 55468 - DNA, 15 bp, Homo sapiens
taagacctctatttc

SEQ ID NO: 55469 - DNA, 15 bp, Homo sapiens
aagacctctatttcc

SEQ ID NO: 55470 - DNA, 15 bp, Homo sapiens
agacctctatttcca

SEQ ID NO: 55471 - DNA, 15 bp, Homo sapiens
gacctctatttccat

SEQ ID NO: 55472 - DNA, 15 bp, Homo sapiens
acctctatttccata

SEQ ID NO: 55473 - DNA, 15 bp, Homo sapiens
cctctatttccatag

SEQ ID NO: 55474 - DNA, 15 bp, Homo sapiens
ctctatttccatagc

SEQ ID NO: 55475 - DNA, 15 bp, Homo sapiens
tctatttccatagca

SEQ ID NO: 55476 - DNA, 15 bp, Homo sapiens
ctatttccatagcac

SEQ ID NO: 55477 - DNA, 15 bp, Homo sapiens
tatttccatagcact

SEQ ID NO: 55478 - DNA, 15 bp, Homo sapiens
atttccatagcactc

SEQ ID NO: 55479 - DNA, 15 bp, Homo sapiens
tttccatagcactca

SEQ ID NO: 55480 - DNA, 15 bp, Homo sapiens
ttccatagcactcaa

SEQ ID NO: 55481 - DNA, 15 bp, Homo sapiens
tccatagcactcaat

SEQ ID NO: 55482 - DNA, 15 bp, Homo sapiens
ccatagcactcaatg

SEQ ID NO: 55483 - DNA, 15 bp, Homo sapiens
catagcactcaatga

SEQ ID NO: 55484 - DNA, 15 bp, Homo sapiens
atagcactcaatgat

SEQ ID NO: 55485 - DNA, 15 bp, Homo sapiens
tagcactcaatgatg

SEQ ID NO: 55486 - DNA, 15 bp, Homo sapiens
agcactcaatgatgg

SEQ ID NO: 55487 - DNA, 15 bp, Homo sapiens
gcactcaatgatggt

SEQ ID NO: 55488 - DNA, 15 bp, Homo sapiens
cactcaatgatggta

SEQ ID NO: 55489 - DNA, 15 bp, Homo sapiens
actcaatgatggtaa

SEQ ID NO: 55490 - DNA, 15 bp, Homo sapiens
ctcaatgatggtaag

SEQ ID NO: 55491 - DNA, 15 bp, Homo sapiens
tcaatgatggtaagc

SEQ ID NO: 55492 - DNA, 15 bp, Homo sapiens
caatgatggtaagct

SEQ ID NO: 55493 - DNA, 15 bp, Homo sapiens
aatgatggtaagctt

SEQ ID NO: 55494 - DNA, 15 bp, Homo sapiens
atgatggtaagcttt

SEQ ID NO: 55495 - DNA, 15 bp, Homo sapiens
tgatggtaagctttc

SEQ ID NO: 55496 - DNA, 15 bp, Homo sapiens
gatggtaagctttca

SEQ ID NO: 55497 - DNA, 15 bp, Homo sapiens
atggtaagctttcac

SEQ ID NO: 55498 - DNA, 15 bp, Homo sapiens
tggtaagctttcact

SEQ ID NO: 55499 - DNA, 15 bp, Homo sapiens
ggtaagctttcacta

SEQ ID NO: 55500 - DNA, 15 bp, Homo sapiens
gtaagctttcactag

SEQ ID NO: 55501 - DNA, 15 bp, Homo sapiens
taagctttcactaga

SEQ ID NO: 55502 - DNA, 15 bp, Homo sapiens
aagctttcactagat

SEQ ID NO: 55503 - DNA, 15 bp, Homo sapiens
agctttcactagatg

SEQ ID NO: 55504 - DNA, 15 bp, Homo sapiens
gctttcactagatgc

SEQ ID NO: 55505 - DNA, 15 bp, Homo sapiens
ctttcactagatgct

SEQ ID NO: 55506 - DNA, 15 bp, Homo sapiens
tttcactagatgcta

SEQ ID NO: 55507 - DNA, 15 bp, Homo sapiens
ttcactagatgctaa

SEQ ID NO: 55508 - DNA, 15 bp, Homo sapiens
tcactagatgctaat

SEQ ID NO: 55509 - DNA, 15 bp, Homo sapiens
cactagatgctaatg

SEQ ID NO: 55510 - DNA, 15 bp, Homo sapiens
actagatgctaatgt

SEQ ID NO: 55511 - DNA, 15 bp, Homo sapiens
ctagatgctaatgtt

SEQ ID NO: 55512 - DNA, 15 bp, Homo sapiens
tagatgctaatgttt

SEQ ID NO: 55513 - DNA, 15 bp, Homo sapiens
agatgctaatgttta

SEQ ID NO: 55514 - DNA, 15 bp, Homo sapiens
gatgctaatgtttat

SEQ ID NO: 55515 - DNA, 15 bp, Homo sapiens
atgctaatgtttatt

SEQ ID NO: 55516 - DNA, 15 bp, Homo sapiens
tgctaatgtttattt

SEQ ID NO: 55517 - DNA, 15 bp, Homo sapiens
gctaatgtttatttt

SEQ ID NO: 55518 - DNA, 15 bp, Homo sapiens
ctaatgtttattttt

SEQ ID NO: 55519 - DNA, 15 bp, Homo sapiens
taatgtttattttta

SEQ ID NO: 55520 - DNA, 15 bp, Homo sapiens
aatgtttatttttat

SEQ ID NO: 55521 - DNA, 15 bp, Homo sapiens
atgtttatttttatt

SEQ ID NO: 55522 - DNA, 15 bp, Homo sapiens
tgtttatttttattg

SEQ ID NO: 55523 - DNA, 15 bp, Homo sapiens
gtttatttttattgc

SEQ ID NO: 55524 - DNA, 15 bp, Homo sapiens
tttatttttattgct

SEQ ID NO: 55525 - DNA, 15 bp, Homo sapiens
ttatttttattgcta

SEQ ID NO: 55526 - DNA, 15 bp, Homo sapiens
tatttttattgctaa

SEQ ID NO: 55527 - DNA, 15 bp, Homo sapiens
atttttattgctaag

SEQ ID NO: 55528 - DNA, 15 bp, Homo sapiens
tttttattgctaagt

SEQ ID NO: 55529 - DNA, 15 bp, Homo sapiens
ttttattgctaagta

SEQ ID NO: 55530 - DNA, 15 bp, Homo sapiens
tttattgctaagtag

SEQ ID NO: 55531 - DNA, 15 bp, Homo sapiens
ttattgctaagtagt

SEQ ID NO: 55532 - DNA, 15 bp, Homo sapiens
tattgctaagtagta

SEQ ID NO: 55533 - DNA, 15 bp, Homo sapiens
attgctaagtagtac

SEQ ID NO: 55534 - DNA, 15 bp, Homo sapiens
ttgctaagtagtacg

SEQ ID NO: 55535 - DNA, 15 bp, Homo sapiens
tgctaagtagtacgc

SEQ ID NO: 55536 - DNA, 15 bp, Homo sapiens
gctaagtagtacgca

SEQ ID NO: 55537 - DNA, 15 bp, Homo sapiens
ctaagtagtacgcaa

SEQ ID NO: 55538 - DNA, 15 bp, Homo sapiens
taagtagtacgcaat

SEQ ID NO: 55539 - DNA, 15 bp, Homo sapiens
aagtagtacgcaatg

SEQ ID NO: 55540 - DNA, 15 bp, Homo sapiens
agtagtacgcaatgt

SEQ ID NO: 55541 - DNA, 15 bp, Homo sapiens
gtagtacgcaatgtt

SEQ ID NO: 55542 - DNA, 15 bp, Homo sapiens
tagtacgcaatgttc

SEQ ID NO: 55543 - DNA, 15 bp, Homo sapiens
agtacgcaatgttct

SEQ ID NO: 55544 - DNA, 15 bp, Homo sapiens
gtacgcaatgttctt

SEQ ID NO: 55545 - DNA, 15 bp, Homo sapiens
tacgcaatgttcttg

SEQ ID NO: 55546 - DNA, 15 bp, Homo sapiens
acgcaatgttcttga

SEQ ID NO: 55547 - DNA, 15 bp, Homo sapiens
cgcaatgttcttgac

SEQ ID NO: 55548 - DNA, 15 bp, Homo sapiens
gcaatgttcttgaca

SEQ ID NO: 55549 - DNA, 15 bp, Homo sapiens
caatgttcttgacat

SEQ ID NO: 55550 - DNA, 15 bp, Homo sapiens
aatgttcttgacata

SEQ ID NO: 55551 - DNA, 15 bp, Homo sapiens
atgttcttgacatag

SEQ ID NO: 55552 - DNA, 15 bp, Homo sapiens
tgttcttgacataga

SEQ ID NO: 55553 - DNA, 15 bp, Homo sapiens
gttcttgacatagat

SEQ ID NO: 55554 - DNA, 15 bp, Homo sapiens
ttcttgacatagatt

SEQ ID NO: 55555 - DNA, 15 bp, Homo sapiens
tcttgacatagatta

SEQ ID NO: 55556 - DNA, 15 bp, Homo sapiens
cttgacatagattat

SEQ ID NO: 55557 - DNA, 15 bp, Homo sapiens
ttgacatagattatg

SEQ ID NO: 55558 - DNA, 15 bp, Homo sapiens
tgacatagattatgg

SEQ ID NO: 55559 - DNA, 15 bp, Homo sapiens
gacatagattatggc

SEQ ID NO: 55560 - DNA, 15 bp, Homo sapiens
acatagattatggca

SEQ ID NO: 55561 - DNA, 15 bp, Homo sapiens
catagattatggcat

SEQ ID NO: 55562 - DNA, 15 bp, Homo sapiens
atagattatggcatg

SEQ ID NO: 55563 - DNA, 15 bp, Homo sapiens
tagattatggcatgt

SEQ ID NO: 55564 - DNA, 15 bp, Homo sapiens
agattatggcatgta

SEQ ID NO: 55565 - DNA, 15 bp, Homo sapiens
gattatggcatgtaa

SEQ ID NO: 55566 - DNA, 15 bp, Homo sapiens
attatggcatgtaaa

SEQ ID NO: 55567 - DNA, 15 bp, Homo sapiens
ttatggcatgtaaat

SEQ ID NO: 55568 - DNA, 15 bp, Homo sapiens
tatggcatgtaaatt

SEQ ID NO: 55569 - DNA, 15 bp, Homo sapiens
atggcatgtaaattt

SEQ ID NO: 55570 - DNA, 15 bp, Homo sapiens
tggcatgtaaattta

SEQ ID NO: 55571 - DNA, 15 bp, Homo sapiens
ggcatgtaaatttaa

SEQ ID NO: 55572 - DNA, 15 bp, Homo sapiens
gcatgtaaatttaag

SEQ ID NO: 55573 - DNA, 15 bp, Homo sapiens
catgtaaatttaaga

SEQ ID NO: 55574 - DNA, 15 bp, Homo sapiens
atgtaaatttaagag

SEQ ID NO: 55575 - DNA, 15 bp, Homo sapiens
tgtaaatttaagaga

SEQ ID NO: 55576 - DNA, 15 bp, Homo sapiens
gtaaatttaagagac

SEQ ID NO: 55577 - DNA, 15 bp, Homo sapiens
taaatttaagagact

SEQ ID NO: 55578 - DNA, 15 bp, Homo sapiens
aaatttaagagactc

SEQ ID NO: 55579 - DNA, 15 bp, Homo sapiens
aatttaagagactca

SEQ ID NO: 55580 - DNA, 15 bp, Homo sapiens
atttaagagactcac

SEQ ID NO: 55581 - DNA, 15 bp, Homo sapiens
tttaagagactcact

SEQ ID NO: 55582 - DNA, 15 bp, Homo sapiens
ttaagagactcactg

SEQ ID NO: 55583 - DNA, 15 bp, Homo sapiens
taagagactcactgc

SEQ ID NO: 55584 - DNA, 15 bp, Homo sapiens
aagagactcactgct

SEQ ID NO: 55585 - DNA, 15 bp, Homo sapiens
agagactcactgctt

SEQ ID NO: 55586 - DNA, 15 bp, Homo sapiens
gagactcactgcttg

SEQ ID NO: 55587 - DNA, 15 bp, Homo sapiens
agactcactgcttgt

SEQ ID NO: 55588 - DNA, 15 bp, Homo sapiens
gactcactgcttgtt

SEQ ID NO: 55589 - DNA, 15 bp, Homo sapiens
actcactgcttgtta

SEQ ID NO: 55590 - DNA, 15 bp, Homo sapiens
ctcactgcttgttaa

SEQ ID NO: 55591 - DNA, 15 bp, Homo sapiens
tcactgcttgttaaa

SEQ ID NO: 55592 - DNA, 15 bp, Homo sapiens
cactgcttgttaaat

SEQ ID NO: 55593 - DNA, 15 bp, Homo sapiens
actgcttgttaaatt

SEQ ID NO: 55594 - DNA, 15 bp, Homo sapiens
ctgcttgttaaattc

SEQ ID NO: 55595 - DNA, 15 bp, Homo sapiens
tgcttgttaaattcc

SEQ ID NO: 55596 - DNA, 15 bp, Homo sapiens
gcttgttaaattccc

SEQ ID NO: 55597 - DNA, 15 bp, Homo sapiens
cttgttaaattccca

SEQ ID NO: 55598 - DNA, 15 bp, Homo sapiens
ttgttaaattcccac

SEQ ID NO: 55599 - DNA, 15 bp, Homo sapiens
tgttaaattcccact

SEQ ID NO: 55600 - DNA, 15 bp, Homo sapiens
gttaaattcccacta

SEQ ID NO: 55601 - DNA, 15 bp, Homo sapiens
ttaaattcccactag

SEQ ID NO: 55602 - DNA, 15 bp, Homo sapiens
taaattcccactaga

SEQ ID NO: 55603 - DNA, 15 bp, Homo sapiens
aaattcccactagaa

SEQ ID NO: 55604 - DNA, 15 bp, Homo sapiens
aattcccactagaaa

SEQ ID NO: 55605 - DNA, 15 bp, Homo sapiens
attcccactagaaaa

SEQ ID NO: 55606 - DNA, 15 bp, Homo sapiens
ttcccactagaaaac

SEQ ID NO: 55607 - DNA, 15 bp, Homo sapiens
tcccactagaaaaca

SEQ ID NO: 55608 - DNA, 15 bp, Homo sapiens
cccactagaaaacac

SEQ ID NO: 55609 - DNA, 15 bp, Homo sapiens
ccactagaaaacaca

SEQ ID NO: 55610 - DNA, 15 bp, Homo sapiens
cactagaaaacacac

SEQ ID NO: 55611 - DNA, 15 bp, Homo sapiens
actagaaaacacaca

SEQ ID NO: 55612 - DNA, 15 bp, Homo sapiens
ctagaaaacacacac

SEQ ID NO: 55613 - DNA, 15 bp, Homo sapiens
tagaaaacacacaca

SEQ ID NO: 55614 - DNA, 15 bp, Homo sapiens
agaaaacacacacag

SEQ ID NO: 55615 - DNA, 15 bp, Homo sapiens
gaaaacacacacaga

SEQ ID NO: 55616 - DNA, 15 bp, Homo sapiens
aaaacacacacagag

SEQ ID NO: 55617 - DNA, 15 bp, Homo sapiens
aaacacacacagaga

SEQ ID NO: 55618 - DNA, 15 bp, Homo sapiens
aacacacacagagac

SEQ ID NO: 55619 - DNA, 15 bp, Homo sapiens
acacacacagagaca

SEQ ID NO: 55620 - DNA, 15 bp, Homo sapiens
cacacacagagacac

SEQ ID NO: 55621 - DNA, 15 bp, Homo sapiens
acacacagagacaca

SEQ ID NO: 55622 - DNA, 15 bp, Homo sapiens
cacacagagacacac

SEQ ID NO: 55623 - DNA, 15 bp, Homo sapiens
acacagagacacaca

SEQ ID NO: 55624 - DNA, 15 bp, Homo sapiens
cacagagacacacac

SEQ ID NO: 55625 - DNA, 15 bp, Homo sapiens
acagagacacacacg

SEQ ID NO: 55626 - DNA, 15 bp, Homo sapiens
cagagacacacacgc

SEQ ID NO: 55627 - DNA, 15 bp, Homo sapiens
agagacacacacgcc

SEQ ID NO: 55628 - DNA, 15 bp, Homo sapiens
gagacacacacgccc

SEQ ID NO: 55629 - DNA, 15 bp, Homo sapiens
agacacacacgccca

SEQ ID NO: 55630 - DNA, 15 bp, Homo sapiens
gacacacacgcccat

SEQ ID NO: 55631 - DNA, 15 bp, Homo sapiens
acacacacgcccata

SEQ ID NO: 55632 - DNA, 15 bp, Homo sapiens
cacacacgcccatac

SEQ ID NO: 55633 - DNA, 15 bp, Homo sapiens
acacacgcccataca

SEQ ID NO: 55634 - DNA, 15 bp, Homo sapiens
cacacgcccatacac

SEQ ID NO: 55635 - DNA, 15 bp, Homo sapiens
acacgcccatacaca

SEQ ID NO: 55636 - DNA, 15 bp, Homo sapiens
cacgcccatacacac

SEQ ID NO: 55637 - DNA, 15 bp, Homo sapiens
acgcccatacacaca

SEQ ID NO: 55638 - DNA, 15 bp, Homo sapiens
cgcccatacacacac

SEQ ID NO: 55639 - DNA, 15 bp, Homo sapiens
gcccatacacacaca

SEQ ID NO: 55640 - DNA, 15 bp, Homo sapiens
cccatacacacacac

SEQ ID NO: 55641 - DNA, 15 bp, Homo sapiens
ccatacacacacaca

SEQ ID NO: 55642 - DNA, 15 bp, Homo sapiens
catacacacacacac

SEQ ID NO: 55643 - DNA, 15 bp, Homo sapiens
atacacacacacaca

SEQ ID NO: 55644 - DNA, 15 bp, Homo sapiens
tacacacacacacac

SEQ ID NO: 55645 - DNA, 15 bp, Homo sapiens
cacacacacacagac

SEQ ID NO: 55646 - DNA, 15 bp, Homo sapiens
acacacacacagaca

SEQ ID NO: 55647 - DNA, 15 bp, Homo sapiens
cacacacacagacac

SEQ ID NO: 55648 - DNA, 15 bp, Homo sapiens
acacacacagacaca

SEQ ID NO: 55649 - DNA, 15 bp, Homo sapiens
cacacacagacacac

SEQ ID NO: 55650 - DNA, 15 bp, Homo sapiens
acacacagacacaca

SEQ ID NO: 55651 - DNA, 15 bp, Homo sapiens
cacacagacacacac

SEQ ID NO: 55652 - DNA, 15 bp, Homo sapiens
acacagacacacaca

SEQ ID NO: 55653 - DNA, 15 bp, Homo sapiens
cacagacacacacac

SEQ ID NO: 55654 - DNA, 15 bp, Homo sapiens
acagacacacacaca

SEQ ID NO: 55655 - DNA, 15 bp, Homo sapiens
cagacacacacacac

SEQ ID NO: 55656 - DNA, 15 bp, Homo sapiens
agacacacacacaca

SEQ ID NO: 55657 - DNA, 15 bp, Homo sapiens
acacacacacacagc

SEQ ID NO: 55658 - DNA, 15 bp, Homo sapiens
cacacacacacagca

SEQ ID NO: 55659 - DNA, 15 bp, Homo sapiens
acacacacacagcag

SEQ ID NO: 55660 - DNA, 15 bp, Homo sapiens
cacacacacagcagt

SEQ ID NO: 55661 - DNA, 15 bp, Homo sapiens
acacacacagcagta

SEQ ID NO: 55662 - DNA, 15 bp, Homo sapiens
cacacacagcagtag

SEQ ID NO: 55663 - DNA, 15 bp, Homo sapiens
acacacagcagtagc

SEQ ID NO: 55664 - DNA, 15 bp, Homo sapiens
cacacagcagtagca

SEQ ID NO: 55665 - DNA, 15 bp, Homo sapiens
acacagcagtagcag

SEQ ID NO: 55666 - DNA, 15 bp, Homo sapiens
cacagcagtagcaga

SEQ ID NO: 55667 - DNA, 15 bp, Homo sapiens
acagcagtagcagat

SEQ ID NO: 55668 - DNA, 15 bp, Homo sapiens
cagcagtagcagatc

SEQ ID NO: 55669 - DNA, 15 bp, Homo sapiens
agcagtagcagatca

SEQ ID NO: 55670 - DNA, 15 bp, Homo sapiens
gcagtagcagatcag

SEQ ID NO: 55671 - DNA, 15 bp, Homo sapiens
cagtagcagatcagc

SEQ ID NO: 55672 - DNA, 15 bp, Homo sapiens
agtagcagatcagca

SEQ ID NO: 55673 - DNA, 15 bp, Homo sapiens
gtagcagatcagcag

SEQ ID NO: 55674 - DNA, 15 bp, Homo sapiens
tagcagatcagcaga

SEQ ID NO: 55675 - DNA, 15 bp, Homo sapiens
agcagatcagcagag

SEQ ID NO: 55676 - DNA, 15 bp, Homo sapiens
gcagatcagcagaga

SEQ ID NO: 55677 - DNA, 15 bp, Homo sapiens
cagatcagcagagaa

SEQ ID NO: 55678 - DNA, 15 bp, Homo sapiens
agatcagcagagaaa

SEQ ID NO: 55679 - DNA, 15 bp, Homo sapiens
gatcagcagagaaag

SEQ ID NO: 55680 - DNA, 15 bp, Homo sapiens
atcagcagagaaaga

SEQ ID NO: 55681 - DNA, 15 bp, Homo sapiens
tcagcagagaaagac

SEQ ID NO: 55682 - DNA, 15 bp, Homo sapiens
cagcagagaaagaca

SEQ ID NO: 55683 - DNA, 15 bp, Homo sapiens
agcagagaaagacac

SEQ ID NO: 55684 - DNA, 15 bp, Homo sapiens
gcagagaaagacacc

SEQ ID NO: 55685 - DNA, 15 bp, Homo sapiens
cagagaaagacacca

SEQ ID NO: 55686 - DNA, 15 bp, Homo sapiens
agagaaagacaccag

SEQ ID NO: 55687 - DNA, 15 bp, Homo sapiens
gagaaagacaccagc

SEQ ID NO: 55688 - DNA, 15 bp, Homo sapiens
agaaagacaccagcc

SEQ ID NO: 55689 - DNA, 15 bp, Homo sapiens
gaaagacaccagcca

SEQ ID NO: 55690 - DNA, 15 bp, Homo sapiens
aaagacaccagccaa

SEQ ID NO: 55691 - DNA, 15 bp, Homo sapiens
aagacaccagccaaa

SEQ ID NO: 55692 - DNA, 15 bp, Homo sapiens
agacaccagccaaag

SEQ ID NO: 55693 - DNA, 15 bp, Homo sapiens
gacaccagccaaaga

SEQ ID NO: 55694 - DNA, 15 bp, Homo sapiens
acaccagccaaagaa

SEQ ID NO: 55695 - DNA, 15 bp, Homo sapiens
caccagccaaagaaa

SEQ ID NO: 55696 - DNA, 15 bp, Homo sapiens
accagccaaagaaag

SEQ ID NO: 55697 - DNA, 15 bp, Homo sapiens
ccagccaaagaaaga

SEQ ID NO: 55698 - DNA, 15 bp, Homo sapiens
cagccaaagaaagat

SEQ ID NO: 55699 - DNA, 15 bp, Homo sapiens
agccaaagaaagata

SEQ ID NO: 55700 - DNA, 15 bp, Homo sapiens
gccaaagaaagataa

SEQ ID NO: 55701 - DNA, 15 bp, Homo sapiens
ccaaagaaagataat

SEQ ID NO: 55702 - DNA, 15 bp, Homo sapiens
caaagaaagataatt

SEQ ID NO: 55703 - DNA, 15 bp, Homo sapiens
aaagaaagataattt

SEQ ID NO: 55704 - DNA, 15 bp, Homo sapiens
aagaaagataatttg

SEQ ID NO: 55705 - DNA, 15 bp, Homo sapiens
agaaagataatttga

SEQ ID NO: 55706 - DNA, 15 bp, Homo sapiens
gaaagataatttgag

SEQ ID NO: 55707 - DNA, 15 bp, Homo sapiens
aaagataatttgaga

SEQ ID NO: 55708 - DNA, 15 bp, Homo sapiens
aagataatttgagat

SEQ ID NO: 55709 - DNA, 15 bp, Homo sapiens
agataatttgagata

SEQ ID NO: 55710 - DNA, 15 bp, Homo sapiens
gataatttgagatac

SEQ ID NO: 55711 - DNA, 15 bp, Homo sapiens
ataatttgagatact

SEQ ID NO: 55712 - DNA, 15 bp, Homo sapiens
taatttgagatactt

SEQ ID NO: 55713 - DNA, 15 bp, Homo sapiens
aatttgagatacttc

SEQ ID NO: 55714 - DNA, 15 bp, Homo sapiens
atttgagatacttct

SEQ ID NO: 55715 - DNA, 15 bp, Homo sapiens
tttgagatacttctg

SEQ ID NO: 55716 - DNA, 15 bp, Homo sapiens
ttgagatacttctga

SEQ ID NO: 55717 - DNA, 15 bp, Homo sapiens
tgagatacttctgag

SEQ ID NO: 55718 - DNA, 15 bp, Homo sapiens
gagatacttctgagg

SEQ ID NO: 55719 - DNA, 15 bp, Homo sapiens
agatacttctgaggt

SEQ ID NO: 55720 - DNA, 15 bp, Homo sapiens
gatacttctgaggta

SEQ ID NO: 55721 - DNA, 15 bp, Homo sapiens
atacttctgaggtag

SEQ ID NO: 55722 - DNA, 15 bp, Homo sapiens
tacttctgaggtagc

SEQ ID NO: 55723 - DNA, 15 bp, Homo sapiens
acttctgaggtagca

SEQ ID NO: 55724 - DNA, 15 bp, Homo sapiens
cttctgaggtagcag

SEQ ID NO: 55725 - DNA, 15 bp, Homo sapiens
ttctgaggtagcagt

SEQ ID NO: 55726 - DNA, 15 bp, Homo sapiens
tctgaggtagcagtt

SEQ ID NO: 55727 - DNA, 15 bp, Homo sapiens
ctgaggtagcagttg

SEQ ID NO: 55728 - DNA, 15 bp, Homo sapiens
tgaggtagcagttgt

SEQ ID NO: 55729 - DNA, 15 bp, Homo sapiens
gaggtagcagttgta

SEQ ID NO: 55730 - DNA, 15 bp, Homo sapiens
aggtagcagttgtaa

SEQ ID NO: 55731 - DNA, 15 bp, Homo sapiens
ggtagcagttgtaaa

SEQ ID NO: 55732 - DNA, 15 bp, Homo sapiens
gtagcagttgtaaaa

SEQ ID NO: 55733 - DNA, 15 bp, Homo sapiens
tagcagttgtaaaat

SEQ ID NO: 55734 - DNA, 15 bp, Homo sapiens
agcagttgtaaaatt

SEQ ID NO: 55735 - DNA, 15 bp, Homo sapiens
gcagttgtaaaatta

SEQ ID NO: 55736 - DNA, 15 bp, Homo sapiens
cagttgtaaaattaa

SEQ ID NO: 55737 - DNA, 15 bp, Homo sapiens
agttgtaaaattaaa

SEQ ID NO: 55738 - DNA, 15 bp, Homo sapiens
gttgtaaaattaaaa

SEQ ID NO: 55739 - DNA, 15 bp, Homo sapiens
ttgtaaaattaaaat

SEQ ID NO: 55740 - DNA, 15 bp, Homo sapiens
tgtaaaattaaaata

SEQ ID NO: 55741 - DNA, 15 bp, Homo sapiens
gtaaaattaaaataa

SEQ ID NO: 55742 - DNA, 15 bp, Homo sapiens
taaaattaaaataag

SEQ ID NO: 55743 - DNA, 15 bp, Homo sapiens
aaaattaaaataagc

SEQ ID NO: 55744 - DNA, 15 bp, Homo sapiens
aaattaaaataagca

SEQ ID NO: 55745 - DNA, 15 bp, Homo sapiens
aattaaaataagcaa

SEQ ID NO: 55746 - DNA, 15 bp, Homo sapiens
attaaaataagcaac

SEQ ID NO: 55747 - DNA, 15 bp, Homo sapiens
ttaaaataagcaact

SEQ ID NO: 55748 - DNA, 15 bp, Homo sapiens
taaaataagcaactc

SEQ ID NO: 55749 - DNA, 15 bp, Homo sapiens
aaaataagcaactca

SEQ ID NO: 55750 - DNA, 15 bp, Homo sapiens
aaataagcaactcat

SEQ ID NO: 55751 - DNA, 15 bp, Homo sapiens
aataagcaactcatt

SEQ ID NO: 55752 - DNA, 15 bp, Homo sapiens
ataagcaactcatta

SEQ ID NO: 55753 - DNA, 15 bp, Homo sapiens
taagcaactcattaa

SEQ ID NO: 55754 - DNA, 15 bp, Homo sapiens
aagcaactcattaaa

SEQ ID NO: 55755 - DNA, 15 bp, Homo sapiens
agcaactcattaaat

SEQ ID NO: 55756 - DNA, 15 bp, Homo sapiens
gcaactcattaaatt

SEQ ID NO: 55757 - DNA, 15 bp, Homo sapiens
caactcattaaatta

SEQ ID NO: 55758 - DNA, 15 bp, Homo sapiens
aactcattaaattat

SEQ ID NO: 55759 - DNA, 15 bp, Homo sapiens
actcattaaattatc

SEQ ID NO: 55760 - DNA, 15 bp, Homo sapiens
ctcattaaattatcc

SEQ ID NO: 55761 - DNA, 15 bp, Homo sapiens
tcattaaattatcca

SEQ ID NO: 55762 - DNA, 15 bp, Homo sapiens
cattaaattatccat

SEQ ID NO: 55763 - DNA, 15 bp, Homo sapiens
attaaattatccata

SEQ ID NO: 55764 - DNA, 15 bp, Homo sapiens
ttaaattatccatag

SEQ ID NO: 55765 - DNA, 15 bp, Homo sapiens
taaattatccataga

SEQ ID NO: 55766 - DNA, 15 bp, Homo sapiens
aaattatccatagag

SEQ ID NO: 55767 - DNA, 15 bp, Homo sapiens
aattatccatagagt

SEQ ID NO: 55768 - DNA, 15 bp, Homo sapiens
attatccatagagtg

SEQ ID NO: 55769 - DNA, 15 bp, Homo sapiens
ttatccatagagtga

SEQ ID NO: 55770 - DNA, 15 bp, Homo sapiens
tatccatagagtgaa

SEQ ID NO: 55771 - DNA, 15 bp, Homo sapiens
atccatagagtgaaa

SEQ ID NO: 55772 - DNA, 15 bp, Homo sapiens
tccatagagtgaaaa

SEQ ID NO: 55773 - DNA, 15 bp, Homo sapiens
ccatagagtgaaaag

SEQ ID NO: 55774 - DNA, 15 bp, Homo sapiens
catagagtgaaaaga

SEQ ID NO: 55775 - DNA, 15 bp, Homo sapiens
atagagtgaaaagaa

SEQ ID NO: 55776 - DNA, 15 bp, Homo sapiens
tagagtgaaaagaaa

SEQ ID NO: 55777 - DNA, 15 bp, Homo sapiens
agagtgaaaagaaag

SEQ ID NO: 55778 - DNA, 15 bp, Homo sapiens
gagtgaaaagaaagc

SEQ ID NO: 55779 - DNA, 15 bp, Homo sapiens
agtgaaaagaaagct

SEQ ID NO: 55780 - DNA, 15 bp, Homo sapiens
gtgaaaagaaagctg

SEQ ID NO: 55781 - DNA, 15 bp, Homo sapiens
tgaaaagaaagctgc

SEQ ID NO: 55782 - DNA, 15 bp, Homo sapiens
gaaaagaaagctgca

SEQ ID NO: 55783 - DNA, 15 bp, Homo sapiens
aaaagaaagctgcaa

SEQ ID NO: 55784 - DNA, 15 bp, Homo sapiens
aaagaaagctgcaaa

SEQ ID NO: 55785 - DNA, 15 bp, Homo sapiens
aagaaagctgcaaaa

SEQ ID NO: 55786 - DNA, 15 bp, Homo sapiens
agaaagctgcaaaaa

SEQ ID NO: 55787 - DNA, 15 bp, Homo sapiens
gaaagctgcaaaaat

SEQ ID NO: 55788 - DNA, 15 bp, Homo sapiens
aaagctgcaaaaata

SEQ ID NO: 55789 - DNA, 15 bp, Homo sapiens
aagctgcaaaaatag

SEQ ID NO: 55790 - DNA, 15 bp, Homo sapiens
agctgcaaaaataga

SEQ ID NO: 55791 - DNA, 15 bp, Homo sapiens
gctgcaaaaatagat

SEQ ID NO: 55792 - DNA, 15 bp, Homo sapiens
ctgcaaaaatagata

SEQ ID NO: 55793 - DNA, 15 bp, Homo sapiens
tgcaaaaatagatat

SEQ ID NO: 55794 - DNA, 15 bp, Homo sapiens
gcaaaaatagatatt

SEQ ID NO: 55795 - DNA, 15 bp, Homo sapiens
caaaaatagatattt

SEQ ID NO: 55796 - DNA, 15 bp, Homo sapiens
aaaaatagatatttt

SEQ ID NO: 55797 - DNA, 15 bp, Homo sapiens
aaaatagatattttt

SEQ ID NO: 55798 - DNA, 15 bp, Homo sapiens
aaatagatatttttc

SEQ ID NO: 55799 - DNA, 15 bp, Homo sapiens
aatagatatttttct

SEQ ID NO: 55800 - DNA, 15 bp, Homo sapiens
atagatatttttctg

SEQ ID NO: 55801 - DNA, 15 bp, Homo sapiens
tagatatttttctgg

SEQ ID NO: 55802 - DNA, 15 bp, Homo sapiens
agatatttttctggc

SEQ ID NO: 55803 - DNA, 15 bp, Homo sapiens
gatatttttctggca

SEQ ID NO: 55804 - DNA, 15 bp, Homo sapiens
atatttttctggcaa

SEQ ID NO: 55805 - DNA, 15 bp, Homo sapiens
tatttttctggcaag

SEQ ID NO: 55806 - DNA, 15 bp, Homo sapiens
atttttctggcaagt

SEQ ID NO: 55807 - DNA, 15 bp, Homo sapiens
tttttctggcaagtc

SEQ ID NO: 55808 - DNA, 15 bp, Homo sapiens
ttttctggcaagtca

SEQ ID NO: 55809 - DNA, 15 bp, Homo sapiens
tttctggcaagtcag

SEQ ID NO: 55810 - DNA, 15 bp, Homo sapiens
ttctggcaagtcagt

SEQ ID NO: 55811 - DNA, 15 bp, Homo sapiens
tctggcaagtcagtg

SEQ ID NO: 55812 - DNA, 15 bp, Homo sapiens
ctggcaagtcagtgc

SEQ ID NO: 55813 - DNA, 15 bp, Homo sapiens
tggcaagtcagtgct

SEQ ID NO: 55814 - DNA, 15 bp, Homo sapiens
ggcaagtcagtgctt

SEQ ID NO: 55815 - DNA, 15 bp, Homo sapiens
gcaagtcagtgcttt

SEQ ID NO: 55816 - DNA, 15 bp, Homo sapiens
caagtcagtgctttt

SEQ ID NO: 55817 - DNA, 15 bp, Homo sapiens
aagtcagtgcttttc

SEQ ID NO: 55818 - DNA, 15 bp, Homo sapiens
agtcagtgcttttca

SEQ ID NO: 55819 - DNA, 15 bp, Homo sapiens
gtcagtgcttttcag

SEQ ID NO: 55820 - DNA, 15 bp, Homo sapiens
tcagtgcttttcaga

SEQ ID NO: 55821 - DNA, 15 bp, Homo sapiens
cagtgcttttcagaa

SEQ ID NO: 55822 - DNA, 15 bp, Homo sapiens
agtgcttttcagaat

SEQ ID NO: 55823 - DNA, 15 bp, Homo sapiens
gtgcttttcagaata

SEQ ID NO: 55824 - DNA, 15 bp, Homo sapiens
tgcttttcagaataa

SEQ ID NO: 55825 - DNA, 15 bp, Homo sapiens
gcttttcagaataaa

SEQ ID NO: 55826 - DNA, 15 bp, Homo sapiens
cttttcagaataaat

SEQ ID NO: 55827 - DNA, 15 bp, Homo sapiens
ttttcagaataaatt

SEQ ID NO: 55828 - DNA, 15 bp, Homo sapiens
tttcagaataaattt

SEQ ID NO: 55829 - DNA, 15 bp, Homo sapiens
ttcagaataaattta

SEQ ID NO: 55830 - DNA, 15 bp, Homo sapiens
tcagaataaatttag

SEQ ID NO: 55831 - DNA, 15 bp, Homo sapiens
cagaataaatttagt

SEQ ID NO: 55832 - DNA, 15 bp, Homo sapiens
agaataaatttagtt

SEQ ID NO: 55833 - DNA, 15 bp, Homo sapiens
gaataaatttagttt

SEQ ID NO: 55834 - DNA, 15 bp, Homo sapiens
aataaatttagtttt

SEQ ID NO: 55835 - DNA, 15 bp, Homo sapiens
ataaatttagttttc

SEQ ID NO: 55836 - DNA, 15 bp, Homo sapiens
taaatttagttttca

SEQ ID NO: 55837 - DNA, 15 bp, Homo sapiens
aaatttagttttcag

SEQ ID NO: 55838 - DNA, 15 bp, Homo sapiens
aatttagttttcagc

SEQ ID NO: 55839 - DNA, 15 bp, Homo sapiens
atttagttttcagca

SEQ ID NO: 55840 - DNA, 15 bp, Homo sapiens
tttagttttcagcag

SEQ ID NO: 55841 - DNA, 15 bp, Homo sapiens
ttagttttcagcaga

SEQ ID NO: 55842 - DNA, 15 bp, Homo sapiens
tagttttcagcagag

SEQ ID NO: 55843 - DNA, 15 bp, Homo sapiens
agttttcagcagagc

SEQ ID NO: 55844 - DNA, 15 bp, Homo sapiens
gttttcagcagagct

SEQ ID NO: 55845 - DNA, 15 bp, Homo sapiens
ttttcagcagagctt

SEQ ID NO: 55846 - DNA, 15 bp, Homo sapiens
tttcagcagagcttt

SEQ ID NO: 55847 - DNA, 15 bp, Homo sapiens
ttcagcagagctttt

SEQ ID NO: 55848 - DNA, 15 bp, Homo sapiens
tcagcagagctttta

SEQ ID NO: 55849 - DNA, 15 bp, Homo sapiens
cagcagagcttttaa

SEQ ID NO: 55850 - DNA, 15 bp, Homo sapiens
agcagagcttttaaa

SEQ ID NO: 55851 - DNA, 15 bp, Homo sapiens
gcagagcttttaaat

SEQ ID NO: 55852 - DNA, 15 bp, Homo sapiens
cagagcttttaaatc

SEQ ID NO: 55853 - DNA, 15 bp, Homo sapiens
agagcttttaaatct

SEQ ID NO: 55854 - DNA, 15 bp, Homo sapiens
gagcttttaaatctg

SEQ ID NO: 55855 - DNA, 15 bp, Homo sapiens
agcttttaaatctga

SEQ ID NO: 55856 - DNA, 15 bp, Homo sapiens
gcttttaaatctgat

SEQ ID NO: 55857 - DNA, 15 bp, Homo sapiens
cttttaaatctgatg

SEQ ID NO: 55858 - DNA, 15 bp, Homo sapiens
ttttaaatctgatga

SEQ ID NO: 55859 - DNA, 15 bp, Homo sapiens
tttaaatctgatgat

SEQ ID NO: 55860 - DNA, 15 bp, Homo sapiens
ttaaatctgatgata

SEQ ID NO: 55861 - DNA, 15 bp, Homo sapiens
taaatctgatgatat

SEQ ID NO: 55862 - DNA, 15 bp, Homo sapiens
aaatctgatgatatc

SEQ ID NO: 55863 - DNA, 15 bp, Homo sapiens
aatctgatgatatca

SEQ ID NO: 55864 - DNA, 15 bp, Homo sapiens
atctgatgatatcag

SEQ ID NO: 55865 - DNA, 15 bp, Homo sapiens
tctgatgatatcagt

SEQ ID NO: 55866 - DNA, 15 bp, Homo sapiens
ctgatgatatcagtt

SEQ ID NO: 55867 - DNA, 15 bp, Homo sapiens
tgatgatatcagttc

SEQ ID NO: 55868 - DNA, 15 bp, Homo sapiens
gatgatatcagttca

SEQ ID NO: 55869 - DNA, 15 bp, Homo sapiens
atgatatcagttcat

SEQ ID NO: 55870 - DNA, 15 bp, Homo sapiens
tgatatcagttcata

SEQ ID NO: 55871 - DNA, 15 bp, Homo sapiens
gatatcagttcatat

SEQ ID NO: 55872 - DNA, 15 bp, Homo sapiens
atatcagttcatatt

SEQ ID NO: 55873 - DNA, 15 bp, Homo sapiens
tatcagttcatattc

SEQ ID NO: 55874 - DNA, 15 bp, Homo sapiens
atcagttcatattca

SEQ ID NO: 55875 - DNA, 15 bp, Homo sapiens
tcagttcatattcat

SEQ ID NO: 55876 - DNA, 15 bp, Homo sapiens
cagttcatattcatt

SEQ ID NO: 55877 - DNA, 15 bp, Homo sapiens
agttcatattcatta

SEQ ID NO: 55878 - DNA, 15 bp, Homo sapiens
gttcatattcattag

SEQ ID NO: 55879 - DNA, 15 bp, Homo sapiens
ttcatattcattaga

SEQ ID NO: 55880 - DNA, 15 bp, Homo sapiens
tcatattcattagag

SEQ ID NO: 55881 - DNA, 15 bp, Homo sapiens
catattcattagagt

SEQ ID NO: 55882 - DNA, 15 bp, Homo sapiens
atattcattagagtt

SEQ ID NO: 55883 - DNA, 15 bp, Homo sapiens
tattcattagagtta

SEQ ID NO: 55884 - DNA, 15 bp, Homo sapiens
attcattagagttat

SEQ ID NO: 55885 - DNA, 15 bp, Homo sapiens
ttcattagagttatt

SEQ ID NO: 55886 - DNA, 15 bp, Homo sapiens
tcattagagttattt

SEQ ID NO: 55887 - DNA, 15 bp, Homo sapiens
cattagagttattta

SEQ ID NO: 55888 - DNA, 15 bp, Homo sapiens
attagagttatttaa

SEQ ID NO: 55889 - DNA, 15 bp, Homo sapiens
ttagagttatttaag

SEQ ID NO: 55890 - DNA, 15 bp, Homo sapiens
tagagttatttaagt

SEQ ID NO: 55891 - DNA, 15 bp, Homo sapiens
agagttatttaagtg

SEQ ID NO: 55892 - DNA, 15 bp, Homo sapiens
gagttatttaagtgg

SEQ ID NO: 55893 - DNA, 15 bp, Homo sapiens
agttatttaagtggt

SEQ ID NO: 55894 - DNA, 15 bp, Homo sapiens
gttatttaagtggtt

SEQ ID NO: 55895 - DNA, 15 bp, Homo sapiens
ttatttaagtggtta

SEQ ID NO: 55896 - DNA, 15 bp, Homo sapiens
tatttaagtggttag

SEQ ID NO: 55897 - DNA, 15 bp, Homo sapiens
atttaagtggttaga

SEQ ID NO: 55898 - DNA, 15 bp, Homo sapiens
tttaagtggttagac

SEQ ID NO: 55899 - DNA, 15 bp, Homo sapiens
ttaagtggttagact

SEQ ID NO: 55900 - DNA, 15 bp, Homo sapiens
taagtggttagacta

SEQ ID NO: 55901 - DNA, 15 bp, Homo sapiens
aagtggttagactag

SEQ ID NO: 55902 - DNA, 15 bp, Homo sapiens
agtggttagactagt

SEQ ID NO: 55903 - DNA, 15 bp, Homo sapiens
gtggttagactagtt

SEQ ID NO: 55904 - DNA, 15 bp, Homo sapiens
tggttagactagttt

SEQ ID NO: 55905 - DNA, 15 bp, Homo sapiens
ggttagactagtttg

SEQ ID NO: 55906 - DNA, 15 bp, Homo sapiens
gttagactagtttgt

SEQ ID NO: 55907 - DNA, 15 bp, Homo sapiens
ttagactagtttgtc

SEQ ID NO: 55908 - DNA, 15 bp, Homo sapiens
tagactagtttgtct

SEQ ID NO: 55909 - DNA, 15 bp, Homo sapiens
agactagtttgtcta

SEQ ID NO: 55910 - DNA, 15 bp, Homo sapiens
gactagtttgtctaa

SEQ ID NO: 55911 - DNA, 15 bp, Homo sapiens
actagtttgtctaat

SEQ ID NO: 55912 - DNA, 15 bp, Homo sapiens
ctagtttgtctaatt

SEQ ID NO: 55913 - DNA, 15 bp, Homo sapiens
tagtttgtctaatta

SEQ ID NO: 55914 - DNA, 15 bp, Homo sapiens
agtttgtctaattaa

SEQ ID NO: 55915 - DNA, 15 bp, Homo sapiens
gtttgtctaattaaa

SEQ ID NO: 55916 - DNA, 15 bp, Homo sapiens
tttgtctaattaaaa

SEQ ID NO: 55917 - DNA, 15 bp, Homo sapiens
ttgtctaattaaaac

SEQ ID NO: 55918 - DNA, 15 bp, Homo sapiens
tgtctaattaaaacc

SEQ ID NO: 55919 - DNA, 15 bp, Homo sapiens
gtctaattaaaacca

SEQ ID NO: 55920 - DNA, 15 bp, Homo sapiens
tctaattaaaaccaa

SEQ ID NO: 55921 - DNA, 15 bp, Homo sapiens
ctaattaaaaccaaa

SEQ ID NO: 55922 - DNA, 15 bp, Homo sapiens
taattaaaaccaaag

SEQ ID NO: 55923 - DNA, 15 bp, Homo sapiens
aattaaaaccaaaga

SEQ ID NO: 55924 - DNA, 15 bp, Homo sapiens
attaaaaccaaagag

SEQ ID NO: 55925 - DNA, 15 bp, Homo sapiens
ttaaaaccaaagagt

SEQ ID NO: 55926 - DNA, 15 bp, Homo sapiens
taaaaccaaagagta

SEQ ID NO: 55927 - DNA, 15 bp, Homo sapiens
aaaaccaaagagtag

SEQ ID NO: 55928 - DNA, 15 bp, Homo sapiens
aaaccaaagagtagc

SEQ ID NO: 55929 - DNA, 15 bp, Homo sapiens
aaccaaagagtagct

SEQ ID NO: 55930 - DNA, 15 bp, Homo sapiens
accaaagagtagctt

SEQ ID NO: 55931 - DNA, 15 bp, Homo sapiens
ccaaagagtagcttt

SEQ ID NO: 55932 - DNA, 15 bp, Homo sapiens
caaagagtagcttta

SEQ ID NO: 55933 - DNA, 15 bp, Homo sapiens
aaagagtagctttac

SEQ ID NO: 55934 - DNA, 15 bp, Homo sapiens
aagagtagctttact

SEQ ID NO: 55935 - DNA, 15 bp, Homo sapiens
agagtagctttactg

SEQ ID NO: 55936 - DNA, 15 bp, Homo sapiens
gagtagctttactgg

SEQ ID NO: 55937 - DNA, 15 bp, Homo sapiens
agtagctttactggc

SEQ ID NO: 55938 - DNA, 15 bp, Homo sapiens
gtagctttactggcc

SEQ ID NO: 55939 - DNA, 15 bp, Homo sapiens
tagctttactggcct

SEQ ID NO: 55940 - DNA, 15 bp, Homo sapiens
agctttactggcctt

SEQ ID NO: 55941 - DNA, 15 bp, Homo sapiens
gctttactggccttt

SEQ ID NO: 55942 - DNA, 15 bp, Homo sapiens
ctttactggcctttg

SEQ ID NO: 55943 - DNA, 15 bp, Homo sapiens
tttactggcctttga

SEQ ID NO: 55944 - DNA, 15 bp, Homo sapiens
ttactggcctttgag

SEQ ID NO: 55945 - DNA, 15 bp, Homo sapiens
tactggcctttgaga

SEQ ID NO: 55946 - DNA, 15 bp, Homo sapiens
actggcctttgagag

SEQ ID NO: 55947 - DNA, 15 bp, Homo sapiens
ctggcctttgagaga

SEQ ID NO: 55948 - DNA, 15 bp, Homo sapiens
tggcctttgagagaa

SEQ ID NO: 55949 - DNA, 15 bp, Homo sapiens
ggcctttgagagaag

SEQ ID NO: 55950 - DNA, 15 bp, Homo sapiens
gcctttgagagaagt

SEQ ID NO: 55951 - DNA, 15 bp, Homo sapiens
cctttgagagaagta

SEQ ID NO: 55952 - DNA, 15 bp, Homo sapiens
ctttgagagaagtat

SEQ ID NO: 55953 - DNA, 15 bp, Homo sapiens
tttgagagaagtata

SEQ ID NO: 55954 - DNA, 15 bp, Homo sapiens
ttgagagaagtatat

SEQ ID NO: 55955 - DNA, 15 bp, Homo sapiens
tgagagaagtatatt

SEQ ID NO: 55956 - DNA, 15 bp, Homo sapiens
gagagaagtatattt

SEQ ID NO: 55957 - DNA, 15 bp, Homo sapiens
agagaagtatattta

SEQ ID NO: 55958 - DNA, 15 bp, Homo sapiens
gagaagtatatttaa

SEQ ID NO: 55959 - DNA, 15 bp, Homo sapiens
agaagtatatttaat

SEQ ID NO: 55960 - DNA, 15 bp, Homo sapiens
gaagtatatttaata

SEQ ID NO: 55961 - DNA, 15 bp, Homo sapiens
aagtatatttaataa

SEQ ID NO: 55962 - DNA, 15 bp, Homo sapiens
agtatatttaataaa

SEQ ID NO: 55963 - DNA, 15 bp, Homo sapiens
gtatatttaataaaa

SEQ ID NO: 55964 - DNA, 15 bp, Homo sapiens
tatatttaataaaaa

SEQ ID NO: 55965 - DNA, 15 bp, Homo sapiens
atatttaataaaaaa

SEQ ID NO: 55966 - DNA, 15 bp, Homo sapiens
tatttaataaaaaat

SEQ ID NO: 55967 - DNA, 15 bp, Homo sapiens
atttaataaaaaata

SEQ ID NO: 55968 - DNA, 15 bp, Homo sapiens
tttaataaaaaatat

SEQ ID NO: 55969 - DNA, 15 bp, Homo sapiens
ttaataaaaaatatg

SEQ ID NO: 55970 - DNA, 15 bp, Homo sapiens
taataaaaaatatgc

SEQ ID NO: 55971 - DNA, 15 bp, Homo sapiens
aataaaaaatatgct

SEQ ID NO: 55972 - DNA, 15 bp, Homo sapiens
ataaaaaatatgctc

SEQ ID NO: 55973 - DNA, 15 bp, Homo sapiens
taaaaaatatgctca

SEQ ID NO: 55974 - DNA, 15 bp, Homo sapiens
aaaaaatatgctcag

SEQ ID NO: 55975 - DNA, 15 bp, Homo sapiens
aaaaatatgctcagt

SEQ ID NO: 55976 - DNA, 15 bp, Homo sapiens
aaaatatgctcagtt

SEQ ID NO: 55977 - DNA, 15 bp, Homo sapiens
aaatatgctcagtta

SEQ ID NO: 55978 - DNA, 15 bp, Homo sapiens
aatatgctcagttag

SEQ ID NO: 55979 - DNA, 15 bp, Homo sapiens
atatgctcagttaga

SEQ ID NO: 55980 - DNA, 15 bp, Homo sapiens
tatgctcagttagac

SEQ ID NO: 55981 - DNA, 15 bp, Homo sapiens
atgctcagttagaca

SEQ ID NO: 55982 - DNA, 15 bp, Homo sapiens
tgctcagttagacat

SEQ ID NO: 55983 - DNA, 15 bp, Homo sapiens
gctcagttagacatc

SEQ ID NO: 55984 - DNA, 15 bp, Homo sapiens
ctcagttagacatca

SEQ ID NO: 55985 - DNA, 15 bp, Homo sapiens
tcagttagacatcat

SEQ ID NO: 55986 - DNA, 15 bp, Homo sapiens
cagttagacatcatt

SEQ ID NO: 55987 - DNA, 15 bp, Homo sapiens
agttagacatcattt

SEQ ID NO: 55988 - DNA, 15 bp, Homo sapiens
gttagacatcatttt

SEQ ID NO: 55989 - DNA, 15 bp, Homo sapiens
ttagacatcatttta

SEQ ID NO: 55990 - DNA, 15 bp, Homo sapiens
tagacatcattttaa

SEQ ID NO: 55991 - DNA, 15 bp, Homo sapiens
agacatcattttaac

SEQ ID NO: 55992 - DNA, 15 bp, Homo sapiens
gacatcattttaact

SEQ ID NO: 55993 - DNA, 15 bp, Homo sapiens
acatcattttaactg

SEQ ID NO: 55994 - DNA, 15 bp, Homo sapiens
catcattttaactga

SEQ ID NO: 55995 - DNA, 15 bp, Homo sapiens
atcattttaactgac

SEQ ID NO: 55996 - DNA, 15 bp, Homo sapiens
tcattttaactgaca

SEQ ID NO: 55997 - DNA, 15 bp, Homo sapiens
cattttaactgacag

SEQ ID NO: 55998 - DNA, 15 bp, Homo sapiens
attttaactgacaga

SEQ ID NO: 55999 - DNA, 15 bp, Homo sapiens
ttttaactgacagat

SEQ ID NO: 56000 - DNA, 15 bp, Homo sapiens
tttaactgacagatt

SEQ ID NO: 56001 - DNA, 15 bp, Homo sapiens
ttaactgacagattg

SEQ ID NO: 56002 - DNA, 15 bp, Homo sapiens
taactgacagattgt

SEQ ID NO: 56003 - DNA, 15 bp, Homo sapiens
aactgacagattgta

SEQ ID NO: 56004 - DNA, 15 bp, Homo sapiens
actgacagattgtaa

SEQ ID NO: 56005 - DNA, 15 bp, Homo sapiens
ctgacagattgtaag

SEQ ID NO: 56006 - DNA, 15 bp, Homo sapiens
tgacagattgtaagc

SEQ ID NO: 56007 - DNA, 15 bp, Homo sapiens
gacagattgtaagca

SEQ ID NO: 56008 - DNA, 15 bp, Homo sapiens
acagattgtaagcaa

SEQ ID NO: 56009 - DNA, 15 bp, Homo sapiens
cagattgtaagcaat

SEQ ID NO: 56010 - DNA, 15 bp, Homo sapiens
agattgtaagcaata

SEQ ID NO: 56011 - DNA, 15 bp, Homo sapiens
gattgtaagcaatat

SEQ ID NO: 56012 - DNA, 15 bp, Homo sapiens
attgtaagcaatatg

SEQ ID NO: 56013 - DNA, 15 bp, Homo sapiens
ttgtaagcaatatga

SEQ ID NO: 56014 - DNA, 15 bp, Homo sapiens
tgtaagcaatatgat

SEQ ID NO: 56015 - DNA, 15 bp, Homo sapiens
gtaagcaatatgatc

SEQ ID NO: 56016 - DNA, 15 bp, Homo sapiens
taagcaatatgatcg

SEQ ID NO: 56017 - DNA, 15 bp, Homo sapiens
aagcaatatgatcga

SEQ ID NO: 56018 - DNA, 15 bp, Homo sapiens
agcaatatgatcgag

SEQ ID NO: 56019 - DNA, 15 bp, Homo sapiens
gcaatatgatcgagt

SEQ ID NO: 56020 - DNA, 15 bp, Homo sapiens
caatatgatcgagtg

SEQ ID NO: 56021 - DNA, 15 bp, Homo sapiens
aatatgatcgagtga

SEQ ID NO: 56022 - DNA, 15 bp, Homo sapiens
atatgatcgagtgaa

SEQ ID NO: 56023 - DNA, 15 bp, Homo sapiens
tatgatcgagtgaat

SEQ ID NO: 56024 - DNA, 15 bp, Homo sapiens
atgatcgagtgaatg

SEQ ID NO: 56025 - DNA, 15 bp, Homo sapiens
tgatcgagtgaatgt

SEQ ID NO: 56026 - DNA, 15 bp, Homo sapiens
gatcgagtgaatgtt

SEQ ID NO: 56027 - DNA, 15 bp, Homo sapiens
atcgagtgaatgtta

SEQ ID NO: 56028 - DNA, 15 bp, Homo sapiens
tcgagtgaatgttac

SEQ ID NO: 56029 - DNA, 15 bp, Homo sapiens
cgagtgaatgttact

SEQ ID NO: 56030 - DNA, 15 bp, Homo sapiens
gagtgaatgttactt

SEQ ID NO: 56031 - DNA, 15 bp, Homo sapiens
agtgaatgttacttg

SEQ ID NO: 56032 - DNA, 15 bp, Homo sapiens
gtgaatgttacttga

SEQ ID NO: 56033 - DNA, 15 bp, Homo sapiens
tgaatgttacttgag

SEQ ID NO: 56034 - DNA, 15 bp, Homo sapiens
gaatgttacttgagc

SEQ ID NO: 56035 - DNA, 15 bp, Homo sapiens
aatgttacttgagca

SEQ ID NO: 56036 - DNA, 15 bp, Homo sapiens
atgttacttgagcaa

SEQ ID NO: 56037 - DNA, 15 bp, Homo sapiens
tgttacttgagcaag

SEQ ID NO: 56038 - DNA, 15 bp, Homo sapiens
gttacttgagcaagt

SEQ ID NO: 56039 - DNA, 15 bp, Homo sapiens
ttacttgagcaagtt

SEQ ID NO: 56040 - DNA, 15 bp, Homo sapiens
tacttgagcaagttt

SEQ ID NO: 56041 - DNA, 15 bp, Homo sapiens
acttgagcaagtttg

SEQ ID NO: 56042 - DNA, 15 bp, Homo sapiens
cttgagcaagtttga

SEQ ID NO: 56043 - DNA, 15 bp, Homo sapiens
ttgagcaagtttgag

SEQ ID NO: 56044 - DNA, 15 bp, Homo sapiens
tgagcaagtttgagc

SEQ ID NO: 56045 - DNA, 15 bp, Homo sapiens
gagcaagtttgagcc

SEQ ID NO: 56046 - DNA, 15 bp, Homo sapiens
agcaagtttgagcct

SEQ ID NO: 56047 - DNA, 15 bp, Homo sapiens
gcaagtttgagcctg

SEQ ID NO: 56048 - DNA, 15 bp, Homo sapiens
caagtttgagcctgg

SEQ ID NO: 56049 - DNA, 15 bp, Homo sapiens
aagtttgagcctggt

SEQ ID NO: 56050 - DNA, 15 bp, Homo sapiens
agtttgagcctggtc

SEQ ID NO: 56051 - DNA, 15 bp, Homo sapiens
gtttgagcctggtcc

SEQ ID NO: 56052 - DNA, 15 bp, Homo sapiens
tttgagcctggtccc

SEQ ID NO: 56053 - DNA, 15 bp, Homo sapiens
ttgagcctggtccca

SEQ ID NO: 56054 - DNA, 15 bp, Homo sapiens
tgagcctggtcccaa

SEQ ID NO: 56055 - DNA, 15 bp, Homo sapiens
gagcctggtcccaaa

SEQ ID NO: 56056 - DNA, 15 bp, Homo sapiens
agcctggtcccaaaa

SEQ ID NO: 56057 - DNA, 15 bp, Homo sapiens
gcctggtcccaaaat

SEQ ID NO: 56058 - DNA, 15 bp, Homo sapiens
cctggtcccaaaatt

SEQ ID NO: 56059 - DNA, 15 bp, Homo sapiens
ctggtcccaaaatta

SEQ ID NO: 56060 - DNA, 15 bp, Homo sapiens
tggtcccaaaattac

SEQ ID NO: 56061 - DNA, 15 bp, Homo sapiens
ggtcccaaaattaca

SEQ ID NO: 56062 - DNA, 15 bp, Homo sapiens
gtcccaaaattacag

SEQ ID NO: 56063 - DNA, 15 bp, Homo sapiens
tcccaaaattacaga

SEQ ID NO: 56064 - DNA, 15 bp, Homo sapiens
cccaaaattacagaa

SEQ ID NO: 56065 - DNA, 15 bp, Homo sapiens
ccaaaattacagaat

SEQ ID NO: 56066 - DNA, 15 bp, Homo sapiens
caaaattacagaatt

SEQ ID NO: 56067 - DNA, 15 bp, Homo sapiens
aaaattacagaatta

SEQ ID NO: 56068 - DNA, 15 bp, Homo sapiens
aaattacagaattac

SEQ ID NO: 56069 - DNA, 15 bp, Homo sapiens
aattacagaattaca

SEQ ID NO: 56070 - DNA, 15 bp, Homo sapiens
attacagaattacaa

SEQ ID NO: 56071 - DNA, 15 bp, Homo sapiens
ttacagaattacaaa

SEQ ID NO: 56072 - DNA, 15 bp, Homo sapiens
tacagaattacaaaa

SEQ ID NO: 56073 - DNA, 15 bp, Homo sapiens
acagaattacaaaat

SEQ ID NO: 56074 - DNA, 15 bp, Homo sapiens
cagaattacaaaata

SEQ ID NO: 56075 - DNA, 15 bp, Homo sapiens
agaattacaaaataa

SEQ ID NO: 56076 - DNA, 15 bp, Homo sapiens
gaattacaaaataaa

SEQ ID NO: 56077 - DNA, 15 bp, Homo sapiens
aattacaaaataaaa

SEQ ID NO: 56078 - DNA, 15 bp, Homo sapiens
attacaaaataaaaa

SEQ ID NO: 56079 - DNA, 15 bp, Homo sapiens
ttacaaaataaaaac

SEQ ID NO: 56080 - DNA, 15 bp, Homo sapiens
tacaaaataaaaacc

SEQ ID NO: 56081 - DNA, 15 bp, Homo sapiens
acaaaataaaaaccc

SEQ ID NO: 56082 - DNA, 15 bp, Homo sapiens
caaaataaaaaccct

SEQ ID NO: 56083 - DNA, 15 bp, Homo sapiens
aaaataaaaaccctt

SEQ ID NO: 56084 - DNA, 15 bp, Homo sapiens
aaataaaaacccttt

SEQ ID NO: 56085 - DNA, 15 bp, Homo sapiens
aataaaaaccctttg

SEQ ID NO: 56086 - DNA, 15 bp, Homo sapiens
ataaaaaccctttgt

SEQ ID NO: 56087 - DNA, 15 bp, Homo sapiens
taaaaaccctttgta

SEQ ID NO: 56088 - DNA, 15 bp, Homo sapiens
aaaaaccctttgtaa

SEQ ID NO: 56089 - DNA, 15 bp, Homo sapiens
aaaaccctttgtaag

SEQ ID NO: 56090 - DNA, 15 bp, Homo sapiens
aaaccctttgtaagt

SEQ ID NO: 56091 - DNA, 15 bp, Homo sapiens
aaccctttgtaagtc

SEQ ID NO: 56092 - DNA, 15 bp, Homo sapiens
accctttgtaagtca

SEQ ID NO: 56093 - DNA, 15 bp, Homo sapiens
ccctttgtaagtcat

SEQ ID NO: 56094 - DNA, 15 bp, Homo sapiens
cctttgtaagtcatg

SEQ ID NO: 56095 - DNA, 15 bp, Homo sapiens
ctttgtaagtcatgc

SEQ ID NO: 56096 - DNA, 15 bp, Homo sapiens
tttgtaagtcatgct

SEQ ID NO: 56097 - DNA, 15 bp, Homo sapiens
ttgtaagtcatgctt

SEQ ID NO: 56098 - DNA, 15 bp, Homo sapiens
tgtaagtcatgcttt

SEQ ID NO: 56099 - DNA, 15 bp, Homo sapiens
gtaagtcatgcttta

SEQ ID NO: 56100 - DNA, 15 bp, Homo sapiens
taagtcatgctttaa

SEQ ID NO: 56101 - DNA, 15 bp, Homo sapiens
aagtcatgctttaat

SEQ ID NO: 56102 - DNA, 15 bp, Homo sapiens
agtcatgctttaatg

SEQ ID NO: 56103 - DNA, 15 bp, Homo sapiens
gtcatgctttaatgc

SEQ ID NO: 56104 - DNA, 15 bp, Homo sapiens
tcatgctttaatgct

SEQ ID NO: 56105 - DNA, 15 bp, Homo sapiens
catgctttaatgctg

SEQ ID NO: 56106 - DNA, 15 bp, Homo sapiens
atgctttaatgctgg

SEQ ID NO: 56107 - DNA, 15 bp, Homo sapiens
tgctttaatgctggt

SEQ ID NO: 56108 - DNA, 15 bp, Homo sapiens
gctttaatgctggtt

SEQ ID NO: 56109 - DNA, 15 bp, Homo sapiens
ctttaatgctggttt

SEQ ID NO: 56110 - DNA, 15 bp, Homo sapiens
tttaatgctggtttt

SEQ ID NO: 56111 - DNA, 15 bp, Homo sapiens
ttaatgctggttttc

SEQ ID NO: 56112 - DNA, 15 bp, Homo sapiens
taatgctggttttcc

SEQ ID NO: 56113 - DNA, 15 bp, Homo sapiens
aatgctggttttccc

SEQ ID NO: 56114 - DNA, 15 bp, Homo sapiens
atgctggttttccct

SEQ ID NO: 56115 - DNA, 15 bp, Homo sapiens
tgctggttttccctc

SEQ ID NO: 56116 - DNA, 15 bp, Homo sapiens
gctggttttccctca

SEQ ID NO: 56117 - DNA, 15 bp, Homo sapiens
ctggttttccctcat

SEQ ID NO: 56118 - DNA, 15 bp, Homo sapiens
tggttttccctcatt

SEQ ID NO: 56119 - DNA, 15 bp, Homo sapiens
ggttttccctcattt

SEQ ID NO: 56120 - DNA, 15 bp, Homo sapiens
gttttccctcatttc

SEQ ID NO: 56121 - DNA, 15 bp, Homo sapiens
ttttccctcatttct

SEQ ID NO: 56122 - DNA, 15 bp, Homo sapiens
tttccctcatttctg

SEQ ID NO: 56123 - DNA, 15 bp, Homo sapiens
ttccctcatttctgt

SEQ ID NO: 56124 - DNA, 15 bp, Homo sapiens
tccctcatttctgtt

SEQ ID NO: 56125 - DNA, 15 bp, Homo sapiens
ccctcatttctgttt

SEQ ID NO: 56126 - DNA, 15 bp, Homo sapiens
cctcatttctgtttc

SEQ ID NO: 56127 - DNA, 15 bp, Homo sapiens
ctcatttctgtttct

SEQ ID NO: 56128 - DNA, 15 bp, Homo sapiens
tcatttctgtttctt

SEQ ID NO: 56129 - DNA, 15 bp, Homo sapiens
catttctgtttcttg

SEQ ID NO: 56130 - DNA, 15 bp, Homo sapiens
atttctgtttcttgg

SEQ ID NO: 56131 - DNA, 15 bp, Homo sapiens
tttctgtttcttggc

SEQ ID NO: 56132 - DNA, 15 bp, Homo sapiens
ttctgtttcttggct

SEQ ID NO: 56133 - DNA, 15 bp, Homo sapiens
tctgtttcttggctg

SEQ ID NO: 56134 - DNA, 15 bp, Homo sapiens
ctgtttcttggctga

SEQ ID NO: 56135 - DNA, 15 bp, Homo sapiens
tgtttcttggctgat

SEQ ID NO: 56136 - DNA, 15 bp, Homo sapiens
gtttcttggctgatt

SEQ ID NO: 56137 - DNA, 15 bp, Homo sapiens
tttcttggctgatta

SEQ ID NO: 56138 - DNA, 15 bp, Homo sapiens
ttcttggctgattat

SEQ ID NO: 56139 - DNA, 15 bp, Homo sapiens
tcttggctgattatc

SEQ ID NO: 56140 - DNA, 15 bp, Homo sapiens
cttggctgattatct

SEQ ID NO: 56141 - DNA, 15 bp, Homo sapiens
ttggctgattatcta

SEQ ID NO: 56142 - DNA, 15 bp, Homo sapiens
tggctgattatctat

SEQ ID NO: 56143 - DNA, 15 bp, Homo sapiens
ggctgattatctatt

SEQ ID NO: 56144 - DNA, 15 bp, Homo sapiens
gctgattatctattt

SEQ ID NO: 56145 - DNA, 15 bp, Homo sapiens
ctgattatctatttt

SEQ ID NO: 56146 - DNA, 15 bp, Homo sapiens
tgattatctattttg

SEQ ID NO: 56147 - DNA, 15 bp, Homo sapiens
gattatctattttgt

SEQ ID NO: 56148 - DNA, 15 bp, Homo sapiens
attatctattttgtg

SEQ ID NO: 56149 - DNA, 15 bp, Homo sapiens
ttatctattttgtgg

SEQ ID NO: 56150 - DNA, 15 bp, Homo sapiens
tatctattttgtggt

SEQ ID NO: 56151 - DNA, 15 bp, Homo sapiens
atctattttgtggtc

SEQ ID NO: 56152 - DNA, 15 bp, Homo sapiens
tctattttgtggtca

SEQ ID NO: 56153 - DNA, 15 bp, Homo sapiens
ctattttgtggtcat

SEQ ID NO: 56154 - DNA, 15 bp, Homo sapiens
tattttgtggtcatc

SEQ ID NO: 56155 - DNA, 15 bp, Homo sapiens
attttgtggtcatcc

SEQ ID NO: 56156 - DNA, 15 bp, Homo sapiens
ttttgtggtcatcca

SEQ ID NO: 56157 - DNA, 15 bp, Homo sapiens
tttgtggtcatccag

SEQ ID NO: 56158 - DNA, 15 bp, Homo sapiens
ttgtggtcatccagt

SEQ ID NO: 56159 - DNA, 15 bp, Homo sapiens
tgtggtcatccagtc

SEQ ID NO: 56160 - DNA, 15 bp, Homo sapiens
gtggtcatccagtcc

SEQ ID NO: 56161 - DNA, 15 bp, Homo sapiens
tggtcatccagtccc

SEQ ID NO: 56162 - DNA, 15 bp, Homo sapiens
ggtcatccagtccct

SEQ ID NO: 56163 - DNA, 15 bp, Homo sapiens
gtcatccagtccctt

SEQ ID NO: 56164 - DNA, 15 bp, Homo sapiens
tcatccagtcccttg

SEQ ID NO: 56165 - DNA, 15 bp, Homo sapiens
catccagtcccttgc

SEQ ID NO: 56166 - DNA, 15 bp, Homo sapiens
atccagtcccttgcc

SEQ ID NO: 56167 - DNA, 15 bp, Homo sapiens
tccagtcccttgcct

SEQ ID NO: 56168 - DNA, 15 bp, Homo sapiens
ccagtcccttgcctt

SEQ ID NO: 56169 - DNA, 15 bp, Homo sapiens
cagtcccttgccttc

SEQ ID NO: 56170 - DNA, 15 bp, Homo sapiens
agtcccttgccttct

SEQ ID NO: 56171 - DNA, 15 bp, Homo sapiens
gtcccttgccttctc

SEQ ID NO: 56172 - DNA, 15 bp, Homo sapiens
tcccttgccttctct

SEQ ID NO: 56173 - DNA, 15 bp, Homo sapiens
cccttgccttctctc

SEQ ID NO: 56174 - DNA, 15 bp, Homo sapiens
ccttgccttctctct

SEQ ID NO: 56175 - DNA, 15 bp, Homo sapiens
cttgccttctctctc

SEQ ID NO: 56176 - DNA, 15 bp, Homo sapiens
ttgccttctctctcg

SEQ ID NO: 56177 - DNA, 15 bp, Homo sapiens
tgccttctctctcgc

SEQ ID NO: 56178 - DNA, 15 bp, Homo sapiens
gccttctctctcgct

SEQ ID NO: 56179 - DNA, 15 bp, Homo sapiens
ccttctctctcgctc

SEQ ID NO: 56180 - DNA, 15 bp, Homo sapiens
cttctctctcgctca

SEQ ID NO: 56181 - DNA, 15 bp, Homo sapiens
ttctctctcgctcac

SEQ ID NO: 56182 - DNA, 15 bp, Homo sapiens
tctctctcgctcact

SEQ ID NO: 56183 - DNA, 15 bp, Homo sapiens
ctctctcgctcactg

SEQ ID NO: 56184 - DNA, 15 bp, Homo sapiens
tctctcgctcactgc

SEQ ID NO: 56185 - DNA, 15 bp, Homo sapiens
ctctcgctcactgcc

SEQ ID NO: 56186 - DNA, 15 bp, Homo sapiens
tctcgctcactgcct

SEQ ID NO: 56187 - DNA, 15 bp, Homo sapiens
ctcgctcactgcctg

SEQ ID NO: 56188 - DNA, 15 bp, Homo sapiens
tcgctcactgcctga

SEQ ID NO: 56189 - DNA, 15 bp, Homo sapiens
cgctcactgcctgat

SEQ ID NO: 56190 - DNA, 15 bp, Homo sapiens
gctcactgcctgatt

SEQ ID NO: 56191 - DNA, 15 bp, Homo sapiens
ctcactgcctgattt

SEQ ID NO: 56192 - DNA, 15 bp, Homo sapiens
tcactgcctgatttt

SEQ ID NO: 56193 - DNA, 15 bp, Homo sapiens
cactgcctgattttg

SEQ ID NO: 56194 - DNA, 15 bp, Homo sapiens
actgcctgattttgg

SEQ ID NO: 56195 - DNA, 15 bp, Homo sapiens
ctgcctgattttgga

SEQ ID NO: 56196 - DNA, 15 bp, Homo sapiens
tgcctgattttggaa

SEQ ID NO: 56197 - DNA, 15 bp, Homo sapiens
gcctgattttggaat

SEQ ID NO: 56198 - DNA, 15 bp, Homo sapiens
cctgattttggaatg

SEQ ID NO: 56199 - DNA, 15 bp, Homo sapiens
ctgattttggaatgt

SEQ ID NO: 56200 - DNA, 15 bp, Homo sapiens
tgattttggaatgtt

SEQ ID NO: 56201 - DNA, 15 bp, Homo sapiens
gattttggaatgttg

SEQ ID NO: 56202 - DNA, 15 bp, Homo sapiens
attttggaatgttgt

SEQ ID NO: 56203 - DNA, 15 bp, Homo sapiens
ttttggaatgttgtt

SEQ ID NO: 56204 - DNA, 15 bp, Homo sapiens
tttggaatgttgttt

SEQ ID NO: 56205 - DNA, 15 bp, Homo sapiens
ttggaatgttgtttc

SEQ ID NO: 56206 - DNA, 15 bp, Homo sapiens
tggaatgttgtttct

SEQ ID NO: 56207 - DNA, 15 bp, Homo sapiens
ggaatgttgtttctt

SEQ ID NO: 56208 - DNA, 15 bp, Homo sapiens
gaatgttgtttctta

SEQ ID NO: 56209 - DNA, 15 bp, Homo sapiens
aatgttgtttcttac

SEQ ID NO: 56210 - DNA, 15 bp, Homo sapiens
atgttgtttcttact

SEQ ID NO: 56211 - DNA, 15 bp, Homo sapiens
tgttgtttcttacta

SEQ ID NO: 56212 - DNA, 15 bp, Homo sapiens
gttgtttcttactaa

SEQ ID NO: 56213 - DNA, 15 bp, Homo sapiens
ttgtttcttactaaa

SEQ ID NO: 56214 - DNA, 15 bp, Homo sapiens
tgtttcttactaaag

SEQ ID NO: 56215 - DNA, 15 bp, Homo sapiens
gtttcttactaaagc

SEQ ID NO: 56216 - DNA, 15 bp, Homo sapiens
tttcttactaaagct

SEQ ID NO: 56217 - DNA, 15 bp, Homo sapiens
ttcttactaaagctt

SEQ ID NO: 56218 - DNA, 15 bp, Homo sapiens
tcttactaaagcttc

SEQ ID NO: 56219 - DNA, 15 bp, Homo sapiens
cttactaaagcttcc

SEQ ID NO: 56220 - DNA, 15 bp, Homo sapiens
ttactaaagcttccc

SEQ ID NO: 56221 - DNA, 15 bp, Homo sapiens
tactaaagcttcccc

SEQ ID NO: 56222 - DNA, 15 bp, Homo sapiens
actaaagcttcccct

SEQ ID NO: 56223 - DNA, 15 bp, Homo sapiens
ctaaagcttccccta

SEQ ID NO: 56224 - DNA, 15 bp, Homo sapiens
taaagcttcccctag

SEQ ID NO: 56225 - DNA, 15 bp, Homo sapiens
aaagcttcccctaga

SEQ ID NO: 56226 - DNA, 15 bp, Homo sapiens
aagcttcccctagag

SEQ ID NO: 56227 - DNA, 15 bp, Homo sapiens
agcttcccctagagg

SEQ ID NO: 56228 - DNA, 15 bp, Homo sapiens
gcttcccctagagga

SEQ ID NO: 56229 - DNA, 15 bp, Homo sapiens
cttcccctagaggac

SEQ ID NO: 56230 - DNA, 15 bp, Homo sapiens
ttcccctagaggaca

SEQ ID NO: 56231 - DNA, 15 bp, Homo sapiens
tcccctagaggacag

SEQ ID NO: 56232 - DNA, 15 bp, Homo sapiens
cccctagaggacagg

SEQ ID NO: 56233 - DNA, 15 bp, Homo sapiens
ccctagaggacaggc

SEQ ID NO: 56234 - DNA, 15 bp, Homo sapiens
cctagaggacaggcc

SEQ ID NO: 56235 - DNA, 15 bp, Homo sapiens
ctagaggacaggcca

SEQ ID NO: 56236 - DNA, 15 bp, Homo sapiens
tagaggacaggccag

SEQ ID NO: 56237 - DNA, 15 bp, Homo sapiens
agaggacaggccagg

SEQ ID NO: 56238 - DNA, 15 bp, Homo sapiens
gaggacaggccagga

SEQ ID NO: 56239 - DNA, 15 bp, Homo sapiens
aggacaggccaggaa

SEQ ID NO: 56240 - DNA, 15 bp, Homo sapiens
ggacaggccaggaaa

SEQ ID NO: 56241 - DNA, 15 bp, Homo sapiens
gacaggccaggaaaa

SEQ ID NO: 56242 - DNA, 15 bp, Homo sapiens
acaggccaggaaaag

SEQ ID NO: 56243 - DNA, 15 bp, Homo sapiens
caggccaggaaaagg

SEQ ID NO: 56244 - DNA, 15 bp, Homo sapiens
aggccaggaaaagga

SEQ ID NO: 56245 - DNA, 15 bp, Homo sapiens
ggccaggaaaaggaa

SEQ ID NO: 56246 - DNA, 15 bp, Homo sapiens
gccaggaaaaggaaa

SEQ ID NO: 56247 - DNA, 15 bp, Homo sapiens
ccaggaaaaggaaag

SEQ ID NO: 56248 - DNA, 15 bp, Homo sapiens
caggaaaaggaaaga

SEQ ID NO: 56249 - DNA, 15 bp, Homo sapiens
aggaaaaggaaagaa

SEQ ID NO: 56250 - DNA, 15 bp, Homo sapiens
ggaaaaggaaagaaa

SEQ ID NO: 56251 - DNA, 15 bp, Homo sapiens
gaaaaggaaagaaac

SEQ ID NO: 56252 - DNA, 15 bp, Homo sapiens
aaaaggaaagaaact

SEQ ID NO: 56253 - DNA, 15 bp, Homo sapiens
aaaggaaagaaacta

SEQ ID NO: 56254 - DNA, 15 bp, Homo sapiens
aaggaaagaaactaa

SEQ ID NO: 56255 - DNA, 15 bp, Homo sapiens
aggaaagaaactaaa

SEQ ID NO: 56256 - DNA, 15 bp, Homo sapiens
ggaaagaaactaaat

SEQ ID NO: 56257 - DNA, 15 bp, Homo sapiens
gaaagaaactaaatt

SEQ ID NO: 56258 - DNA, 15 bp, Homo sapiens
aaagaaactaaattc

SEQ ID NO: 56259 - DNA, 15 bp, Homo sapiens
aagaaactaaattca

SEQ ID NO: 56260 - DNA, 15 bp, Homo sapiens
agaaactaaattcac

SEQ ID NO: 56261 - DNA, 15 bp, Homo sapiens
gaaactaaattcacc

SEQ ID NO: 56262 - DNA, 15 bp, Homo sapiens
aaactaaattcacca

SEQ ID NO: 56263 - DNA, 15 bp, Homo sapiens
aactaaattcaccag

SEQ ID NO: 56264 - DNA, 15 bp, Homo sapiens
actaaattcaccagc

SEQ ID NO: 56265 - DNA, 15 bp, Homo sapiens
ctaaattcaccagct

SEQ ID NO: 56266 - DNA, 15 bp, Homo sapiens
taaattcaccagctt

SEQ ID NO: 56267 - DNA, 15 bp, Homo sapiens
aaattcaccagcttc

SEQ ID NO: 56268 - DNA, 15 bp, Homo sapiens
aattcaccagcttct

SEQ ID NO: 56269 - DNA, 15 bp, Homo sapiens
attcaccagcttctc

SEQ ID NO: 56270 - DNA, 15 bp, Homo sapiens
ttcaccagcttctct

SEQ ID NO: 56271 - DNA, 15 bp, Homo sapiens
tcaccagcttctctt

SEQ ID NO: 56272 - DNA, 15 bp, Homo sapiens
caccagcttctcttc

SEQ ID NO: 56273 - DNA, 15 bp, Homo sapiens
accagcttctcttct

SEQ ID NO: 56274 - DNA, 15 bp, Homo sapiens
ccagcttctcttctt

SEQ ID NO: 56275 - DNA, 15 bp, Homo sapiens
cagcttctcttctta

SEQ ID NO: 56276 - DNA, 15 bp, Homo sapiens
agcttctcttcttat

SEQ ID NO: 56277 - DNA, 15 bp, Homo sapiens
gcttctcttcttatt

SEQ ID NO: 56278 - DNA, 15 bp, Homo sapiens
cttctcttcttatta

SEQ ID NO: 56279 - DNA, 15 bp, Homo sapiens
ttctcttcttattaa

SEQ ID NO: 56280 - DNA, 15 bp, Homo sapiens
tctcttcttattaag

SEQ ID NO: 56281 - DNA, 15 bp, Homo sapiens
ctcttcttattaaga

SEQ ID NO: 56282 - DNA, 15 bp, Homo sapiens
tcttcttattaagaa

SEQ ID NO: 56283 - DNA, 15 bp, Homo sapiens
cttcttattaagaat

SEQ ID NO: 56284 - DNA, 15 bp, Homo sapiens
ttcttattaagaatt

SEQ ID NO: 56285 - DNA, 15 bp, Homo sapiens
tcttattaagaattt

SEQ ID NO: 56286 - DNA, 15 bp, Homo sapiens
cttattaagaattta

SEQ ID NO: 56287 - DNA, 15 bp, Homo sapiens
ttattaagaatttag

SEQ ID NO: 56288 - DNA, 15 bp, Homo sapiens
tattaagaatttaga

SEQ ID NO: 56289 - DNA, 15 bp, Homo sapiens
attaagaatttagat

SEQ ID NO: 56290 - DNA, 15 bp, Homo sapiens
ttaagaatttagatc

SEQ ID NO: 56291 - DNA, 15 bp, Homo sapiens
taagaatttagatca

SEQ ID NO: 56292 - DNA, 15 bp, Homo sapiens
aagaatttagatcag

SEQ ID NO: 56293 - DNA, 15 bp, Homo sapiens
agaatttagatcaga

SEQ ID NO: 56294 - DNA, 15 bp, Homo sapiens
gaatttagatcagaa

SEQ ID NO: 56295 - DNA, 15 bp, Homo sapiens
aatttagatcagaaa

SEQ ID NO: 56296 - DNA, 15 bp, Homo sapiens
atttagatcagaaat

SEQ ID NO: 56297 - DNA, 15 bp, Homo sapiens
tttagatcagaaatc

SEQ ID NO: 56298 - DNA, 15 bp, Homo sapiens
ttagatcagaaatct

SEQ ID NO: 56299 - DNA, 15 bp, Homo sapiens
tagatcagaaatctg

SEQ ID NO: 56300 - DNA, 15 bp, Homo sapiens
agatcagaaatctga

SEQ ID NO: 56301 - DNA, 15 bp, Homo sapiens
gatcagaaatctgat

SEQ ID NO: 56302 - DNA, 15 bp, Homo sapiens
atcagaaatctgata

SEQ ID NO: 56303 - DNA, 15 bp, Homo sapiens
tcagaaatctgatag

SEQ ID NO: 56304 - DNA, 15 bp, Homo sapiens
cagaaatctgatagg

SEQ ID NO: 56305 - DNA, 15 bp, Homo sapiens
agaaatctgataggg

SEQ ID NO: 56306 - DNA, 15 bp, Homo sapiens
gaaatctgataggga

SEQ ID NO: 56307 - DNA, 15 bp, Homo sapiens
aaatctgatagggaa

SEQ ID NO: 56308 - DNA, 15 bp, Homo sapiens
aatctgatagggaaa

SEQ ID NO: 56309 - DNA, 15 bp, Homo sapiens
atctgatagggaaag

SEQ ID NO: 56310 - DNA, 15 bp, Homo sapiens
tctgatagggaaaga

SEQ ID NO: 56311 - DNA, 15 bp, Homo sapiens
ctgatagggaaagag

SEQ ID NO: 56312 - DNA, 15 bp, Homo sapiens
tgatagggaaagagt

SEQ ID NO: 56313 - DNA, 15 bp, Homo sapiens
gatagggaaagagtc

SEQ ID NO: 56314 - DNA, 15 bp, Homo sapiens
atagggaaagagtct

SEQ ID NO: 56315 - DNA, 15 bp, Homo sapiens
tagggaaagagtctg

SEQ ID NO: 56316 - DNA, 15 bp, Homo sapiens
agggaaagagtctgg

SEQ ID NO: 56317 - DNA, 15 bp, Homo sapiens
gggaaagagtctggc

SEQ ID NO: 56318 - DNA, 15 bp, Homo sapiens
ggaaagagtctggca

SEQ ID NO: 56319 - DNA, 15 bp, Homo sapiens
gaaagagtctggcaa

SEQ ID NO: 56320 - DNA, 15 bp, Homo sapiens
aaagagtctggcaaa

SEQ ID NO: 56321 - DNA, 15 bp, Homo sapiens
aagagtctggcaaat

SEQ ID NO: 56322 - DNA, 15 bp, Homo sapiens
agagtctggcaaatg

SEQ ID NO: 56323 - DNA, 15 bp, Homo sapiens
gagtctggcaaatga

SEQ ID NO: 56324 - DNA, 15 bp, Homo sapiens
agtctggcaaatgaa

SEQ ID NO: 56325 - DNA, 15 bp, Homo sapiens
gtctggcaaatgaaa

SEQ ID NO: 56326 - DNA, 15 bp, Homo sapiens
tctggcaaatgaaag

SEQ ID NO: 56327 - DNA, 15 bp, Homo sapiens
ctggcaaatgaaagg

SEQ ID NO: 56328 - DNA, 15 bp, Homo sapiens
tggcaaatgaaaggg

SEQ ID NO: 56329 - DNA, 15 bp, Homo sapiens
ggcaaatgaaagggg

SEQ ID NO: 56330 - DNA, 15 bp, Homo sapiens
gcaaatgaaagggga

SEQ ID NO: 56331 - DNA, 15 bp, Homo sapiens
caaatgaaaggggaa

SEQ ID NO: 56332 - DNA, 15 bp, Homo sapiens
aaatgaaaggggaag

SEQ ID NO: 56333 - DNA, 15 bp, Homo sapiens
aatgaaaggggaagc

SEQ ID NO: 56334 - DNA, 15 bp, Homo sapiens
atgaaaggggaagct

SEQ ID NO: 56335 - DNA, 15 bp, Homo sapiens
tgaaaggggaagctt

SEQ ID NO: 56336 - DNA, 15 bp, Homo sapiens
gaaaggggaagctta

SEQ ID NO: 56337 - DNA, 15 bp, Homo sapiens
aaaggggaagcttat

SEQ ID NO: 56338 - DNA, 15 bp, Homo sapiens
aaggggaagcttatt

SEQ ID NO: 56339 - DNA, 15 bp, Homo sapiens
aggggaagcttattt

SEQ ID NO: 56340 - DNA, 15 bp, Homo sapiens
ggggaagcttattta

SEQ ID NO: 56341 - DNA, 15 bp, Homo sapiens
gggaagcttatttat

SEQ ID NO: 56342 - DNA, 15 bp, Homo sapiens
ggaagcttatttatg

SEQ ID NO: 56343 - DNA, 15 bp, Homo sapiens
gaagcttatttatgt

SEQ ID NO: 56344 - DNA, 15 bp, Homo sapiens
aagcttatttatgtt

SEQ ID NO: 56345 - DNA, 15 bp, Homo sapiens
agcttatttatgttg

SEQ ID NO: 56346 - DNA, 15 bp, Homo sapiens
gcttatttatgttga

SEQ ID NO: 56347 - DNA, 15 bp, Homo sapiens
cttatttatgttgat

SEQ ID NO: 56348 - DNA, 15 bp, Homo sapiens
ttatttatgttgatt

SEQ ID NO: 56349 - DNA, 15 bp, Homo sapiens
tatttatgttgattt

SEQ ID NO: 56350 - DNA, 15 bp, Homo sapiens
atttatgttgatttt

SEQ ID NO: 56351 - DNA, 15 bp, Homo sapiens
tttatgttgatttta

SEQ ID NO: 56352 - DNA, 15 bp, Homo sapiens
ttatgttgattttag

SEQ ID NO: 56353 - DNA, 15 bp, Homo sapiens
tatgttgattttaga

SEQ ID NO: 56354 - DNA, 15 bp, Homo sapiens
atgttgattttagat

SEQ ID NO: 56355 - DNA, 15 bp, Homo sapiens
tgttgattttagatc

SEQ ID NO: 56356 - DNA, 15 bp, Homo sapiens
gttgattttagatct

SEQ ID NO: 56357 - DNA, 15 bp, Homo sapiens
ttgattttagatctt

SEQ ID NO: 56358 - DNA, 15 bp, Homo sapiens
tgattttagatcttt

SEQ ID NO: 56359 - DNA, 15 bp, Homo sapiens
gattttagatcttta

SEQ ID NO: 56360 - DNA, 15 bp, Homo sapiens
attttagatctttaa

SEQ ID NO: 56361 - DNA, 15 bp, Homo sapiens
ttttagatctttaaa

SEQ ID NO: 56362 - DNA, 15 bp, Homo sapiens
tttagatctttaaaa

SEQ ID NO: 56363 - DNA, 15 bp, Homo sapiens
ttagatctttaaaag

SEQ ID NO: 56364 - DNA, 15 bp, Homo sapiens
tagatctttaaaagc

SEQ ID NO: 56365 - DNA, 15 bp, Homo sapiens
agatctttaaaagcc

SEQ ID NO: 56366 - DNA, 15 bp, Homo sapiens
gatctttaaaagcct

SEQ ID NO: 56367 - DNA, 15 bp, Homo sapiens
atctttaaaagcctt

SEQ ID NO: 56368 - DNA, 15 bp, Homo sapiens
tctttaaaagccttc

SEQ ID NO: 56369 - DNA, 15 bp, Homo sapiens
ctttaaaagccttct

SEQ ID NO: 56370 - DNA, 15 bp, Homo sapiens
tttaaaagccttctt

SEQ ID NO: 56371 - DNA, 15 bp, Homo sapiens
ttaaaagccttcttt

SEQ ID NO: 56372 - DNA, 15 bp, Homo sapiens
taaaagccttctttc

SEQ ID NO: 56373 - DNA, 15 bp, Homo sapiens
aaaagccttctttcc

SEQ ID NO: 56374 - DNA, 15 bp, Homo sapiens
aaagccttctttcca

SEQ ID NO: 56375 - DNA, 15 bp, Homo sapiens
aagccttctttccaa

SEQ ID NO: 56376 - DNA, 15 bp, Homo sapiens
agccttctttccaat

SEQ ID NO: 56377 - DNA, 15 bp, Homo sapiens
gccttctttccaatg

SEQ ID NO: 56378 - DNA, 15 bp, Homo sapiens
ccttctttccaatgt

SEQ ID NO: 56379 - DNA, 15 bp, Homo sapiens
cttctttccaatgta

SEQ ID NO: 56380 - DNA, 15 bp, Homo sapiens
ttctttccaatgtac

SEQ ID NO: 56381 - DNA, 15 bp, Homo sapiens
tctttccaatgtaca

SEQ ID NO: 56382 - DNA, 15 bp, Homo sapiens
ctttccaatgtacat

SEQ ID NO: 56383 - DNA, 15 bp, Homo sapiens
tttccaatgtacatt

SEQ ID NO: 56384 - DNA, 15 bp, Homo sapiens
ttccaatgtacatta

SEQ ID NO: 56385 - DNA, 15 bp, Homo sapiens
tccaatgtacattaa

SEQ ID NO: 56386 - DNA, 15 bp, Homo sapiens
ccaatgtacattaat

SEQ ID NO: 56387 - DNA, 15 bp, Homo sapiens
caatgtacattaata

SEQ ID NO: 56388 - DNA, 15 bp, Homo sapiens
aatgtacattaatag

SEQ ID NO: 56389 - DNA, 15 bp, Homo sapiens
atgtacattaataga

SEQ ID NO: 56390 - DNA, 15 bp, Homo sapiens
tgtacattaatagac

SEQ ID NO: 56391 - DNA, 15 bp, Homo sapiens
gtacattaatagaca

SEQ ID NO: 56392 - DNA, 15 bp, Homo sapiens
tacattaatagacaa

SEQ ID NO: 56393 - DNA, 15 bp, Homo sapiens
acattaatagacaat

SEQ ID NO: 56394 - DNA, 15 bp, Homo sapiens
cattaatagacaatt

SEQ ID NO: 56395 - DNA, 15 bp, Homo sapiens
attaatagacaattg

SEQ ID NO: 56396 - DNA, 15 bp, Homo sapiens
ttaatagacaattga

SEQ ID NO: 56397 - DNA, 15 bp, Homo sapiens
taatagacaattgaa

SEQ ID NO: 56398 - DNA, 15 bp, Homo sapiens
aatagacaattgaaa

SEQ ID NO: 56399 - DNA, 15 bp, Homo sapiens
atagacaattgaaaa

SEQ ID NO: 56400 - DNA, 15 bp, Homo sapiens
tagacaattgaaaaa

SEQ ID NO: 56401 - DNA, 15 bp, Homo sapiens
agacaattgaaaaat

SEQ ID NO: 56402 - DNA, 15 bp, Homo sapiens
gacaattgaaaaata

SEQ ID NO: 56403 - DNA, 15 bp, Homo sapiens
acaattgaaaaataa

SEQ ID NO: 56404 - DNA, 15 bp, Homo sapiens
caattgaaaaataat

SEQ ID NO: 56405 - DNA, 15 bp, Homo sapiens
aattgaaaaataata

SEQ ID NO: 56406 - DNA, 15 bp, Homo sapiens
attgaaaaataatat

SEQ ID NO: 56407 - DNA, 15 bp, Homo sapiens
ttgaaaaataatatt

SEQ ID NO: 56408 - DNA, 15 bp, Homo sapiens
tgaaaaataatattt

SEQ ID NO: 56409 - DNA, 15 bp, Homo sapiens
gaaaaataatatttt

SEQ ID NO: 56410 - DNA, 15 bp, Homo sapiens
aaaaataatatttta

SEQ ID NO: 56411 - DNA, 15 bp, Homo sapiens
aaaataatattttat

SEQ ID NO: 56412 - DNA, 15 bp, Homo sapiens
aaataatattttata

SEQ ID NO: 56413 - DNA, 15 bp, Homo sapiens
aataatattttataa

SEQ ID NO: 56414 - DNA, 15 bp, Homo sapiens
ataatattttataag

SEQ ID NO: 56415 - DNA, 15 bp, Homo sapiens
taatattttataagc

SEQ ID NO: 56416 - DNA, 15 bp, Homo sapiens
aatattttataagcc

SEQ ID NO: 56417 - DNA, 15 bp, Homo sapiens
atattttataagcca

SEQ ID NO: 56418 - DNA, 15 bp, Homo sapiens
tattttataagccaa

SEQ ID NO: 56419 - DNA, 15 bp, Homo sapiens
attttataagccaac

SEQ ID NO: 56420 - DNA, 15 bp, Homo sapiens
ttttataagccaact

SEQ ID NO: 56421 - DNA, 15 bp, Homo sapiens
tttataagccaacta

SEQ ID NO: 56422 - DNA, 15 bp, Homo sapiens
ttataagccaactaa

SEQ ID NO: 56423 - DNA, 15 bp, Homo sapiens
tataagccaactaat

SEQ ID NO: 56424 - DNA, 15 bp, Homo sapiens
ataagccaactaatc

SEQ ID NO: 56425 - DNA, 15 bp, Homo sapiens
taagccaactaatca

SEQ ID NO: 56426 - DNA, 15 bp, Homo sapiens
aagccaactaatcac

SEQ ID NO: 56427 - DNA, 15 bp, Homo sapiens
agccaactaatcact

SEQ ID NO: 56428 - DNA, 15 bp, Homo sapiens
gccaactaatcactt

SEQ ID NO: 56429 - DNA, 15 bp, Homo sapiens
ccaactaatcacttg

SEQ ID NO: 56430 - DNA, 15 bp, Homo sapiens
caactaatcacttgc

SEQ ID NO: 56431 - DNA, 15 bp, Homo sapiens
aactaatcacttgct

SEQ ID NO: 56432 - DNA, 15 bp, Homo sapiens
actaatcacttgctt

SEQ ID NO: 56433 - DNA, 15 bp, Homo sapiens
ctaatcacttgcttt

SEQ ID NO: 56434 - DNA, 15 bp, Homo sapiens
taatcacttgctttt

SEQ ID NO: 56435 - DNA, 15 bp, Homo sapiens
aatcacttgctttta

SEQ ID NO: 56436 - DNA, 15 bp, Homo sapiens
atcacttgcttttaa

SEQ ID NO: 56437 - DNA, 15 bp, Homo sapiens
tcacttgcttttaaa

SEQ ID NO: 56438 - DNA, 15 bp, Homo sapiens
cacttgcttttaaaa

SEQ ID NO: 56439 - DNA, 15 bp, Homo sapiens
acttgcttttaaaat

SEQ ID NO: 56440 - DNA, 15 bp, Homo sapiens
cttgcttttaaaatc

SEQ ID NO: 56441 - DNA, 15 bp, Homo sapiens
ttgcttttaaaatcc

SEQ ID NO: 56442 - DNA, 15 bp, Homo sapiens
tgcttttaaaatccc

SEQ ID NO: 56443 - DNA, 15 bp, Homo sapiens
gcttttaaaatcccc

SEQ ID NO: 56444 - DNA, 15 bp, Homo sapiens
cttttaaaatcccca

SEQ ID NO: 56445 - DNA, 15 bp, Homo sapiens
ttttaaaatccccac

SEQ ID NO: 56446 - DNA, 15 bp, Homo sapiens
tttaaaatccccact

SEQ ID NO: 56447 - DNA, 15 bp, Homo sapiens
ttaaaatccccactt

SEQ ID NO: 56448 - DNA, 15 bp, Homo sapiens
taaaatccccactta

SEQ ID NO: 56449 - DNA, 15 bp, Homo sapiens
aaaatccccacttac

SEQ ID NO: 56450 - DNA, 15 bp, Homo sapiens
aaatccccacttact

SEQ ID NO: 56451 - DNA, 15 bp, Homo sapiens
aatccccacttacta

SEQ ID NO: 56452 - DNA, 15 bp, Homo sapiens
atccccacttactac

SEQ ID NO: 56453 - DNA, 15 bp, Homo sapiens
tccccacttactacc

SEQ ID NO: 56454 - DNA, 15 bp, Homo sapiens
ccccacttactacct

SEQ ID NO: 56455 - DNA, 15 bp, Homo sapiens
cccacttactacctt

SEQ ID NO: 56456 - DNA, 15 bp, Homo sapiens
ccacttactaccttg

SEQ ID NO: 56457 - DNA, 15 bp, Homo sapiens
cacttactaccttga

SEQ ID NO: 56458 - DNA, 15 bp, Homo sapiens
acttactaccttgag

SEQ ID NO: 56459 - DNA, 15 bp, Homo sapiens
cttactaccttgagc

SEQ ID NO: 56460 - DNA, 15 bp, Homo sapiens
ttactaccttgagca

SEQ ID NO: 56461 - DNA, 15 bp, Homo sapiens
tactaccttgagcat

SEQ ID NO: 56462 - DNA, 15 bp, Homo sapiens
actaccttgagcata

SEQ ID NO: 56463 - DNA, 15 bp, Homo sapiens
ctaccttgagcatat

SEQ ID NO: 56464 - DNA, 15 bp, Homo sapiens
taccttgagcatata

SEQ ID NO: 56465 - DNA, 15 bp, Homo sapiens
accttgagcatatac

SEQ ID NO: 56466 - DNA, 15 bp, Homo sapiens
ccttgagcatataca

SEQ ID NO: 56467 - DNA, 15 bp, Homo sapiens
cttgagcatatacat

SEQ ID NO: 56468 - DNA, 15 bp, Homo sapiens
ttgagcatatacatt

SEQ ID NO: 56469 - DNA, 15 bp, Homo sapiens
tgagcatatacatta

SEQ ID NO: 56470 - DNA, 15 bp, Homo sapiens
gagcatatacattag

SEQ ID NO: 56471 - DNA, 15 bp, Homo sapiens
agcatatacattaga

SEQ ID NO: 56472 - DNA, 15 bp, Homo sapiens
gcatatacattagat

SEQ ID NO: 56473 - DNA, 15 bp, Homo sapiens
catatacattagatt

SEQ ID NO: 56474 - DNA, 15 bp, Homo sapiens
atatacattagatta

SEQ ID NO: 56475 - DNA, 15 bp, Homo sapiens
tatacattagattat

SEQ ID NO: 56476 - DNA, 15 bp, Homo sapiens
atacattagattatg

SEQ ID NO: 56477 - DNA, 15 bp, Homo sapiens
tacattagattatgt

SEQ ID NO: 56478 - DNA, 15 bp, Homo sapiens
acattagattatgtt

SEQ ID NO: 56479 - DNA, 15 bp, Homo sapiens
cattagattatgttt

SEQ ID NO: 56480 - DNA, 15 bp, Homo sapiens
attagattatgtttt

SEQ ID NO: 56481 - DNA, 15 bp, Homo sapiens
ttagattatgtttta

SEQ ID NO: 56482 - DNA, 15 bp, Homo sapiens
tagattatgttttaa

SEQ ID NO: 56483 - DNA, 15 bp, Homo sapiens
agattatgttttaaa

SEQ ID NO: 56484 - DNA, 15 bp, Homo sapiens
gattatgttttaaaa

SEQ ID NO: 56485 - DNA, 15 bp, Homo sapiens
attatgttttaaaat

SEQ ID NO: 56486 - DNA, 15 bp, Homo sapiens
ttatgttttaaaata

SEQ ID NO: 56487 - DNA, 15 bp, Homo sapiens
tatgttttaaaataa

SEQ ID NO: 56488 - DNA, 15 bp, Homo sapiens
atgttttaaaataac

SEQ ID NO: 56489 - DNA, 15 bp, Homo sapiens
tgttttaaaataact

SEQ ID NO: 56490 - DNA, 15 bp, Homo sapiens
gttttaaaataacta

SEQ ID NO: 56491 - DNA, 15 bp, Homo sapiens
ttttaaaataactag

SEQ ID NO: 56492 - DNA, 15 bp, Homo sapiens
tttaaaataactagt

SEQ ID NO: 56493 - DNA, 15 bp, Homo sapiens
ttaaaataactagta

SEQ ID NO: 56494 - DNA, 15 bp, Homo sapiens
taaaataactagtac

SEQ ID NO: 56495 - DNA, 15 bp, Homo sapiens
aaaataactagtact

SEQ ID NO: 56496 - DNA, 15 bp, Homo sapiens
aaataactagtactc

SEQ ID NO: 56497 - DNA, 15 bp, Homo sapiens
aataactagtactct

SEQ ID NO: 56498 - DNA, 15 bp, Homo sapiens
ataactagtactctg

SEQ ID NO: 56499 - DNA, 15 bp, Homo sapiens
taactagtactctgg

SEQ ID NO: 56500 - DNA, 15 bp, Homo sapiens
aactagtactctggt

SEQ ID NO: 56501 - DNA, 15 bp, Homo sapiens
actagtactctggtt

SEQ ID NO: 56502 - DNA, 15 bp, Homo sapiens
ctagtactctggttc

SEQ ID NO: 56503 - DNA, 15 bp, Homo sapiens
tagtactctggttca

SEQ ID NO: 56504 - DNA, 15 bp, Homo sapiens
agtactctggttcag

SEQ ID NO: 56505 - DNA, 15 bp, Homo sapiens
gtactctggttcagt

SEQ ID NO: 56506 - DNA, 15 bp, Homo sapiens
tactctggttcagtg

SEQ ID NO: 56507 - DNA, 15 bp, Homo sapiens
actctggttcagtga

SEQ ID NO: 56508 - DNA, 15 bp, Homo sapiens
ctctggttcagtgaa

SEQ ID NO: 56509 - DNA, 15 bp, Homo sapiens
tctggttcagtgaaa

SEQ ID NO: 56510 - DNA, 15 bp, Homo sapiens
ctggttcagtgaaat

SEQ ID NO: 56511 - DNA, 15 bp, Homo sapiens
tggttcagtgaaatg

SEQ ID NO: 56512 - DNA, 15 bp, Homo sapiens
ggttcagtgaaatga

SEQ ID NO: 56513 - DNA, 15 bp, Homo sapiens
gttcagtgaaatgaa

SEQ ID NO: 56514 - DNA, 15 bp, Homo sapiens
ttcagtgaaatgaaa

SEQ ID NO: 56515 - DNA, 15 bp, Homo sapiens
tcagtgaaatgaaaa

SEQ ID NO: 56516 - DNA, 15 bp, Homo sapiens
cagtgaaatgaaaat

SEQ ID NO: 56517 - DNA, 15 bp, Homo sapiens
agtgaaatgaaaatg

SEQ ID NO: 56518 - DNA, 15 bp, Homo sapiens
gtgaaatgaaaatga

SEQ ID NO: 56519 - DNA, 15 bp, Homo sapiens
tgaaatgaaaatgat

SEQ ID NO: 56520 - DNA, 15 bp, Homo sapiens
gaaatgaaaatgata

SEQ ID NO: 56521 - DNA, 15 bp, Homo sapiens
aaatgaaaatgatat

SEQ ID NO: 56522 - DNA, 15 bp, Homo sapiens
aatgaaaatgatatg

SEQ ID NO: 56523 - DNA, 15 bp, Homo sapiens
atgaaaatgatatgt

SEQ ID NO: 56524 - DNA, 15 bp, Homo sapiens
tgaaaatgatatgtg

SEQ ID NO: 56525 - DNA, 15 bp, Homo sapiens
gaaaatgatatgtgc

SEQ ID NO: 56526 - DNA, 15 bp, Homo sapiens
aaaatgatatgtgca

SEQ ID NO: 56527 - DNA, 15 bp, Homo sapiens
aaatgatatgtgcaa

SEQ ID NO: 56528 - DNA, 15 bp, Homo sapiens
aatgatatgtgcaaa

SEQ ID NO: 56529 - DNA, 15 bp, Homo sapiens
atgatatgtgcaaag

SEQ ID NO: 56530 - DNA, 15 bp, Homo sapiens
tgatatgtgcaaaga

SEQ ID NO: 56531 - DNA, 15 bp, Homo sapiens
gatatgtgcaaagag

SEQ ID NO: 56532 - DNA, 15 bp, Homo sapiens
atatgtgcaaagaga

SEQ ID NO: 56533 - DNA, 15 bp, Homo sapiens
tatgtgcaaagagaa

SEQ ID NO: 56534 - DNA, 15 bp, Homo sapiens
atgtgcaaagagaat

SEQ ID NO: 56535 - DNA, 15 bp, Homo sapiens
tgtgcaaagagaatg

SEQ ID NO: 56536 - DNA, 15 bp, Homo sapiens
gtgcaaagagaatgt

SEQ ID NO: 56537 - DNA, 15 bp, Homo sapiens
tgcaaagagaatgtc

SEQ ID NO: 56538 - DNA, 15 bp, Homo sapiens
gcaaagagaatgtca

SEQ ID NO: 56539 - DNA, 15 bp, Homo sapiens
caaagagaatgtcat

SEQ ID NO: 56540 - DNA, 15 bp, Homo sapiens
aaagagaatgtcata

SEQ ID NO: 56541 - DNA, 15 bp, Homo sapiens
aagagaatgtcataa

SEQ ID NO: 56542 - DNA, 15 bp, Homo sapiens
agagaatgtcataat

SEQ ID NO: 56543 - DNA, 15 bp, Homo sapiens
gagaatgtcataatg

SEQ ID NO: 56544 - DNA, 15 bp, Homo sapiens
agaatgtcataatga

SEQ ID NO: 56545 - DNA, 15 bp, Homo sapiens
gaatgtcataatgat

SEQ ID NO: 56546 - DNA, 15 bp, Homo sapiens
aatgtcataatgata

SEQ ID NO: 56547 - DNA, 15 bp, Homo sapiens
atgtcataatgatac

SEQ ID NO: 56548 - DNA, 15 bp, Homo sapiens
tgtcataatgatacc

SEQ ID NO: 56549 - DNA, 15 bp, Homo sapiens
gtcataatgatacct

SEQ ID NO: 56550 - DNA, 15 bp, Homo sapiens
tcataatgatacctc

SEQ ID NO: 56551 - DNA, 15 bp, Homo sapiens
cataatgatacctcc

SEQ ID NO: 56552 - DNA, 15 bp, Homo sapiens
ataatgatacctccc

SEQ ID NO: 56553 - DNA, 15 bp, Homo sapiens
taatgatacctccca

SEQ ID NO: 56554 - DNA, 15 bp, Homo sapiens
aatgatacctcccat

SEQ ID NO: 56555 - DNA, 15 bp, Homo sapiens
atgatacctcccatt

SEQ ID NO: 56556 - DNA, 15 bp, Homo sapiens
tgatacctcccattt

SEQ ID NO: 56557 - DNA, 15 bp, Homo sapiens
gatacctcccattta

SEQ ID NO: 56558 - DNA, 15 bp, Homo sapiens
atacctcccatttat

SEQ ID NO: 56559 - DNA, 15 bp, Homo sapiens
tacctcccatttatg

SEQ ID NO: 56560 - DNA, 15 bp, Homo sapiens
acctcccatttatgg

SEQ ID NO: 56561 - DNA, 15 bp, Homo sapiens
cctcccatttatgga

SEQ ID NO: 56562 - DNA, 15 bp, Homo sapiens
ctcccatttatggag

SEQ ID NO: 56563 - DNA, 15 bp, Homo sapiens
tcccatttatggagt

SEQ ID NO: 56564 - DNA, 15 bp, Homo sapiens
cccatttatggagtg

SEQ ID NO: 56565 - DNA, 15 bp, Homo sapiens
ccatttatggagtgc

SEQ ID NO: 56566 - DNA, 15 bp, Homo sapiens
catttatggagtgcc

SEQ ID NO: 56567 - DNA, 15 bp, Homo sapiens
atttatggagtgcct

SEQ ID NO: 56568 - DNA, 15 bp, Homo sapiens
tttatggagtgcctg

SEQ ID NO: 56569 - DNA, 15 bp, Homo sapiens
ttatggagtgcctgc

SEQ ID NO: 56570 - DNA, 15 bp, Homo sapiens
tatggagtgcctgct

SEQ ID NO: 56571 - DNA, 15 bp, Homo sapiens
atggagtgcctgctt

SEQ ID NO: 56572 - DNA, 15 bp, Homo sapiens
tggagtgcctgcttc

SEQ ID NO: 56573 - DNA, 15 bp, Homo sapiens
ggagtgcctgcttcc

SEQ ID NO: 56574 - DNA, 15 bp, Homo sapiens
gagtgcctgcttccc

SEQ ID NO: 56575 - DNA, 15 bp, Homo sapiens
agtgcctgcttccca

SEQ ID NO: 56576 - DNA, 15 bp, Homo sapiens
gtgcctgcttcccag

SEQ ID NO: 56577 - DNA, 15 bp, Homo sapiens
tgcctgcttcccagt

SEQ ID NO: 56578 - DNA, 15 bp, Homo sapiens
gcctgcttcccagtt

SEQ ID NO: 56579 - DNA, 15 bp, Homo sapiens
cctgcttcccagttt

SEQ ID NO: 56580 - DNA, 15 bp, Homo sapiens
ctgcttcccagtttg

SEQ ID NO: 56581 - DNA, 15 bp, Homo sapiens
tgcttcccagtttgc

SEQ ID NO: 56582 - DNA, 15 bp, Homo sapiens
gcttcccagtttgca

SEQ ID NO: 56583 - DNA, 15 bp, Homo sapiens
cttcccagtttgcaa

SEQ ID NO: 56584 - DNA, 15 bp, Homo sapiens
ttcccagtttgcaaa

SEQ ID NO: 56585 - DNA, 15 bp, Homo sapiens
tcccagtttgcaaag

SEQ ID NO: 56586 - DNA, 15 bp, Homo sapiens
cccagtttgcaaagc

SEQ ID NO: 56587 - DNA, 15 bp, Homo sapiens
ccagtttgcaaagcc

SEQ ID NO: 56588 - DNA, 15 bp, Homo sapiens
cagtttgcaaagccc

SEQ ID NO: 56589 - DNA, 15 bp, Homo sapiens
agtttgcaaagccct

SEQ ID NO: 56590 - DNA, 15 bp, Homo sapiens
gtttgcaaagccctt

SEQ ID NO: 56591 - DNA, 15 bp, Homo sapiens
tttgcaaagccctta

SEQ ID NO: 56592 - DNA, 15 bp, Homo sapiens
ttgcaaagcccttat

SEQ ID NO: 56593 - DNA, 15 bp, Homo sapiens
tgcaaagcccttata

SEQ ID NO: 56594 - DNA, 15 bp, Homo sapiens
gcaaagcccttatat

SEQ ID NO: 56595 - DNA, 15 bp, Homo sapiens
caaagcccttatata

SEQ ID NO: 56596 - DNA, 15 bp, Homo sapiens
aaagcccttatatat

SEQ ID NO: 56597 - DNA, 15 bp, Homo sapiens
aagcccttatatata

SEQ ID NO: 56598 - DNA, 15 bp, Homo sapiens
agcccttatatatat

SEQ ID NO: 56599 - DNA, 15 bp, Homo sapiens
gcccttatatatatt

SEQ ID NO: 56600 - DNA, 15 bp, Homo sapiens
cccttatatatattc

SEQ ID NO: 56601 - DNA, 15 bp, Homo sapiens
ccttatatatattct

SEQ ID NO: 56602 - DNA, 15 bp, Homo sapiens
cttatatatattctc

SEQ ID NO: 56603 - DNA, 15 bp, Homo sapiens
ttatatatattctct

SEQ ID NO: 56604 - DNA, 15 bp, Homo sapiens
tatatatattctctt

SEQ ID NO: 56605 - DNA, 15 bp, Homo sapiens
atatatattctcttc

SEQ ID NO: 56606 - DNA, 15 bp, Homo sapiens
tatatattctcttct

SEQ ID NO: 56607 - DNA, 15 bp, Homo sapiens
atatattctcttcta

SEQ ID NO: 56608 - DNA, 15 bp, Homo sapiens
tatattctcttctat

SEQ ID NO: 56609 - DNA, 15 bp, Homo sapiens
atattctcttctatc

SEQ ID NO: 56610 - DNA, 15 bp, Homo sapiens
tattctcttctatcc

SEQ ID NO: 56611 - DNA, 15 bp, Homo sapiens
attctcttctatcct

SEQ ID NO: 56612 - DNA, 15 bp, Homo sapiens
ttctcttctatcctc

SEQ ID NO: 56613 - DNA, 15 bp, Homo sapiens
tctcttctatcctcc

SEQ ID NO: 56614 - DNA, 15 bp, Homo sapiens
ctcttctatcctcca

SEQ ID NO: 56615 - DNA, 15 bp, Homo sapiens
tcttctatcctccaa

SEQ ID NO: 56616 - DNA, 15 bp, Homo sapiens
cttctatcctccaaa

SEQ ID NO: 56617 - DNA, 15 bp, Homo sapiens
ttctatcctccaaaa

SEQ ID NO: 56618 - DNA, 15 bp, Homo sapiens
tctatcctccaaaaa

SEQ ID NO: 56619 - DNA, 15 bp, Homo sapiens
ctatcctccaaaaat

SEQ ID NO: 56620 - DNA, 15 bp, Homo sapiens
tatcctccaaaaatt

SEQ ID NO: 56621 - DNA, 15 bp, Homo sapiens
atcctccaaaaattg

SEQ ID NO: 56622 - DNA, 15 bp, Homo sapiens
tcctccaaaaattgc

SEQ ID NO: 56623 - DNA, 15 bp, Homo sapiens
cctccaaaaattgct

SEQ ID NO: 56624 - DNA, 15 bp, Homo sapiens
ctccaaaaattgctg

SEQ ID NO: 56625 - DNA, 15 bp, Homo sapiens
tccaaaaattgctgt

SEQ ID NO: 56626 - DNA, 15 bp, Homo sapiens
ccaaaaattgctgtg

SEQ ID NO: 56627 - DNA, 15 bp, Homo sapiens
caaaaattgctgtgt

SEQ ID NO: 56628 - DNA, 15 bp, Homo sapiens
aaaaattgctgtgtt

SEQ ID NO: 56629 - DNA, 15 bp, Homo sapiens
aaaattgctgtgttg

SEQ ID NO: 56630 - DNA, 15 bp, Homo sapiens
aaattgctgtgttgt

SEQ ID NO: 56631 - DNA, 15 bp, Homo sapiens
aattgctgtgttgta

SEQ ID NO: 56632 - DNA, 15 bp, Homo sapiens
attgctgtgttgtag

SEQ ID NO: 56633 - DNA, 15 bp, Homo sapiens
ttgctgtgttgtagg

SEQ ID NO: 56634 - DNA, 15 bp, Homo sapiens
tgctgtgttgtaggt

SEQ ID NO: 56635 - DNA, 15 bp, Homo sapiens
gctgtgttgtaggtc

SEQ ID NO: 56636 - DNA, 15 bp, Homo sapiens
ctgtgttgtaggtct

SEQ ID NO: 56637 - DNA, 15 bp, Homo sapiens
tgtgttgtaggtctt

SEQ ID NO: 56638 - DNA, 15 bp, Homo sapiens
gtgttgtaggtctta

SEQ ID NO: 56639 - DNA, 15 bp, Homo sapiens
tgttgtaggtcttac

SEQ ID NO: 56640 - DNA, 15 bp, Homo sapiens
gttgtaggtcttact

SEQ ID NO: 56641 - DNA, 15 bp, Homo sapiens
ttgtaggtcttacta

SEQ ID NO: 56642 - DNA, 15 bp, Homo sapiens
tgtaggtcttactat

SEQ ID NO: 56643 - DNA, 15 bp, Homo sapiens
gtaggtcttactatc

SEQ ID NO: 56644 - DNA, 15 bp, Homo sapiens
taggtcttactatca

SEQ ID NO: 56645 - DNA, 15 bp, Homo sapiens
aggtcttactatcaa

SEQ ID NO: 56646 - DNA, 15 bp, Homo sapiens
ggtcttactatcaat

SEQ ID NO: 56647 - DNA, 15 bp, Homo sapiens
gtcttactatcaatg

SEQ ID NO: 56648 - DNA, 15 bp, Homo sapiens
tcttactatcaatga

SEQ ID NO: 56649 - DNA, 15 bp, Homo sapiens
cttactatcaatgac

SEQ ID NO: 56650 - DNA, 15 bp, Homo sapiens
ttactatcaatgaca

SEQ ID NO: 56651 - DNA, 15 bp, Homo sapiens
tactatcaatgacac

SEQ ID NO: 56652 - DNA, 15 bp, Homo sapiens
actatcaatgacact

SEQ ID NO: 56653 - DNA, 15 bp, Homo sapiens
ctatcaatgacactg

SEQ ID NO: 56654 - DNA, 15 bp, Homo sapiens
tatcaatgacactga

SEQ ID NO: 56655 - DNA, 15 bp, Homo sapiens
atcaatgacactgaa

SEQ ID NO: 56656 - DNA, 15 bp, Homo sapiens
tcaatgacactgaaa

SEQ ID NO: 56657 - DNA, 15 bp, Homo sapiens
caatgacactgaaaa

SEQ ID NO: 56658 - DNA, 15 bp, Homo sapiens
aatgacactgaaaaa

SEQ ID NO: 56659 - DNA, 15 bp, Homo sapiens
atgacactgaaaaag

SEQ ID NO: 56660 - DNA, 15 bp, Homo sapiens
tgacactgaaaaagc

SEQ ID NO: 56661 - DNA, 15 bp, Homo sapiens
gacactgaaaaagct

SEQ ID NO: 56662 - DNA, 15 bp, Homo sapiens
acactgaaaaagcta

SEQ ID NO: 56663 - DNA, 15 bp, Homo sapiens
cactgaaaaagctac

SEQ ID NO: 56664 - DNA, 15 bp, Homo sapiens
actgaaaaagctact

SEQ ID NO: 56665 - DNA, 15 bp, Homo sapiens
ctgaaaaagctactg

SEQ ID NO: 56666 - DNA, 15 bp, Homo sapiens
tgaaaaagctactgg

SEQ ID NO: 56667 - DNA, 15 bp, Homo sapiens
gaaaaagctactggc

SEQ ID NO: 56668 - DNA, 15 bp, Homo sapiens
aaaaagctactggca

SEQ ID NO: 56669 - DNA, 15 bp, Homo sapiens
aaaagctactggcag

SEQ ID NO: 56670 - DNA, 15 bp, Homo sapiens
aaagctactggcagg

SEQ ID NO: 56671 - DNA, 15 bp, Homo sapiens
aagctactggcagga

SEQ ID NO: 56672 - DNA, 15 bp, Homo sapiens
agctactggcaggat

SEQ ID NO: 56673 - DNA, 15 bp, Homo sapiens
gctactggcaggatg

SEQ ID NO: 56674 - DNA, 15 bp, Homo sapiens
ctactggcaggatgc

SEQ ID NO: 56675 - DNA, 15 bp, Homo sapiens
tactggcaggatgct

SEQ ID NO: 56676 - DNA, 15 bp, Homo sapiens
actggcaggatgctc

SEQ ID NO: 56677 - DNA, 15 bp, Homo sapiens
ctggcaggatgctca

SEQ ID NO: 56678 - DNA, 15 bp, Homo sapiens
tggcaggatgctcat

SEQ ID NO: 56679 - DNA, 15 bp, Homo sapiens
ggcaggatgctcata

SEQ ID NO: 56680 - DNA, 15 bp, Homo sapiens
gcaggatgctcatat

SEQ ID NO: 56681 - DNA, 15 bp, Homo sapiens
caggatgctcatatt

SEQ ID NO: 56682 - DNA, 15 bp, Homo sapiens
aggatgctcatattc

SEQ ID NO: 56683 - DNA, 15 bp, Homo sapiens
ggatgctcatattct

SEQ ID NO: 56684 - DNA, 15 bp, Homo sapiens
gatgctcatattctc

SEQ ID NO: 56685 - DNA, 15 bp, Homo sapiens
atgctcatattctca

SEQ ID NO: 56686 - DNA, 15 bp, Homo sapiens
tgctcatattctcat

SEQ ID NO: 56687 - DNA, 15 bp, Homo sapiens
gctcatattctcatc

SEQ ID NO: 56688 - DNA, 15 bp, Homo sapiens
ctcatattctcatct

SEQ ID NO: 56689 - DNA, 15 bp, Homo sapiens
tcatattctcatctg

SEQ ID NO: 56690 - DNA, 15 bp, Homo sapiens
catattctcatctga

SEQ ID NO: 56691 - DNA, 15 bp, Homo sapiens
atattctcatctgaa

SEQ ID NO: 56692 - DNA, 15 bp, Homo sapiens
tattctcatctgaat

SEQ ID NO: 56693 - DNA, 15 bp, Homo sapiens
attctcatctgaatc

SEQ ID NO: 56694 - DNA, 15 bp, Homo sapiens
ttctcatctgaatca

SEQ ID NO: 56695 - DNA, 15 bp, Homo sapiens
tctcatctgaatcaa

SEQ ID NO: 56696 - DNA, 15 bp, Homo sapiens
ctcatctgaatcaat

SEQ ID NO: 56697 - DNA, 15 bp, Homo sapiens
tcatctgaatcaata

SEQ ID NO: 56698 - DNA, 15 bp, Homo sapiens
catctgaatcaatac

SEQ ID NO: 56699 - DNA, 15 bp, Homo sapiens
atctgaatcaatact

SEQ ID NO: 56700 - DNA, 15 bp, Homo sapiens
tctgaatcaatactg

SEQ ID NO: 56701 - DNA, 15 bp, Homo sapiens
ctgaatcaatactgg

SEQ ID NO: 56702 - DNA, 15 bp, Homo sapiens
tgaatcaatactggt

SEQ ID NO: 56703 - DNA, 15 bp, Homo sapiens
gaatcaatactggta

SEQ ID NO: 56704 - DNA, 15 bp, Homo sapiens
aatcaatactggtat

SEQ ID NO: 56705 - DNA, 15 bp, Homo sapiens
atcaatactggtata

SEQ ID NO: 56706 - DNA, 15 bp, Homo sapiens
tcaatactggtatac

SEQ ID NO: 56707 - DNA, 15 bp, Homo sapiens
caatactggtatact

SEQ ID NO: 56708 - DNA, 15 bp, Homo sapiens
aatactggtatactc

SEQ ID NO: 56709 - DNA, 15 bp, Homo sapiens
atactggtatactcc

SEQ ID NO: 56710 - DNA, 15 bp, Homo sapiens
tactggtatactcca

SEQ ID NO: 56711 - DNA, 15 bp, Homo sapiens
actggtatactccat

SEQ ID NO: 56712 - DNA, 15 bp, Homo sapiens
ctggtatactccatt

SEQ ID NO: 56713 - DNA, 15 bp, Homo sapiens
tggtatactccattg

SEQ ID NO: 56714 - DNA, 15 bp, Homo sapiens
ggtatactccattgg

SEQ ID NO: 56715 - DNA, 15 bp, Homo sapiens
gtatactccattggg

SEQ ID NO: 56716 - DNA, 15 bp, Homo sapiens
tatactccattgggg

SEQ ID NO: 56717 - DNA, 15 bp, Homo sapiens
atactccattggggg

SEQ ID NO: 56718 - DNA, 15 bp, Homo sapiens
tactccattggggga

SEQ ID NO: 56719 - DNA, 15 bp, Homo sapiens
actccattgggggag

SEQ ID NO: 56720 - DNA, 15 bp, Homo sapiens
ctccattgggggagc

SEQ ID NO: 56721 - DNA, 15 bp, Homo sapiens
tccattgggggagct

SEQ ID NO: 56722 - DNA, 15 bp, Homo sapiens
ccattgggggagcta

SEQ ID NO: 56723 - DNA, 15 bp, Homo sapiens
cattgggggagctag

SEQ ID NO: 56724 - DNA, 15 bp, Homo sapiens
attgggggagctaga

SEQ ID NO: 56725 - DNA, 15 bp, Homo sapiens
ttgggggagctagac

SEQ ID NO: 56726 - DNA, 15 bp, Homo sapiens
tgggggagctagacc

SEQ ID NO: 56727 - DNA, 15 bp, Homo sapiens
gggggagctagacca

SEQ ID NO: 56728 - DNA, 15 bp, Homo sapiens
ggggagctagaccaa

SEQ ID NO: 56729 - DNA, 15 bp, Homo sapiens
gggagctagaccaag

SEQ ID NO: 56730 - DNA, 15 bp, Homo sapiens
ggagctagaccaagc

SEQ ID NO: 56731 - DNA, 15 bp, Homo sapiens
gagctagaccaagct

SEQ ID NO: 56732 - DNA, 15 bp, Homo sapiens
agctagaccaagcta

SEQ ID NO: 56733 - DNA, 15 bp, Homo sapiens
gctagaccaagctaa

SEQ ID NO: 56734 - DNA, 15 bp, Homo sapiens
ctagaccaagctaaa

SEQ ID NO: 56735 - DNA, 15 bp, Homo sapiens
tagaccaagctaaaa

SEQ ID NO: 56736 - DNA, 15 bp, Homo sapiens
agaccaagctaaaat

SEQ ID NO: 56737 - DNA, 15 bp, Homo sapiens
gaccaagctaaaatc

SEQ ID NO: 56738 - DNA, 15 bp, Homo sapiens
accaagctaaaatct

SEQ ID NO: 56739 - DNA, 15 bp, Homo sapiens
ccaagctaaaatctc

SEQ ID NO: 56740 - DNA, 15 bp, Homo sapiens
caagctaaaatctca

SEQ ID NO: 56741 - DNA, 15 bp, Homo sapiens
aagctaaaatctcac

SEQ ID NO: 56742 - DNA, 15 bp, Homo sapiens
agctaaaatctcaca

SEQ ID NO: 56743 - DNA, 15 bp, Homo sapiens
gctaaaatctcacat

SEQ ID NO: 56744 - DNA, 15 bp, Homo sapiens
ctaaaatctcacata

SEQ ID NO: 56745 - DNA, 15 bp, Homo sapiens
taaaatctcacatac

SEQ ID NO: 56746 - DNA, 15 bp, Homo sapiens
aaaatctcacataca

SEQ ID NO: 56747 - DNA, 15 bp, Homo sapiens
aaatctcacatacag

SEQ ID NO: 56748 - DNA, 15 bp, Homo sapiens
aatctcacatacaga

SEQ ID NO: 56749 - DNA, 15 bp, Homo sapiens
atctcacatacagaa

SEQ ID NO: 56750 - DNA, 15 bp, Homo sapiens
tctcacatacagaaa

SEQ ID NO: 56751 - DNA, 15 bp, Homo sapiens
ctcacatacagaaat

SEQ ID NO: 56752 - DNA, 15 bp, Homo sapiens
tcacatacagaaata

SEQ ID NO: 56753 - DNA, 15 bp, Homo sapiens
cacatacagaaatat

SEQ ID NO: 56754 - DNA, 15 bp, Homo sapiens
acatacagaaatatt

SEQ ID NO: 56755 - DNA, 15 bp, Homo sapiens
catacagaaatatta

SEQ ID NO: 56756 - DNA, 15 bp, Homo sapiens
atacagaaatattaa

SEQ ID NO: 56757 - DNA, 15 bp, Homo sapiens
tacagaaatattaat

SEQ ID NO: 56758 - DNA, 15 bp, Homo sapiens
acagaaatattaata

SEQ ID NO: 56759 - DNA, 15 bp, Homo sapiens
cagaaatattaatat

SEQ ID NO: 56760 - DNA, 15 bp, Homo sapiens
agaaatattaatatg

SEQ ID NO: 56761 - DNA, 15 bp, Homo sapiens
gaaatattaatatgc

SEQ ID NO: 56762 - DNA, 15 bp, Homo sapiens
aaatattaatatgca

SEQ ID NO: 56763 - DNA, 15 bp, Homo sapiens
aatattaatatgcaa

SEQ ID NO: 56764 - DNA, 15 bp, Homo sapiens
atattaatatgcaag

SEQ ID NO: 56765 - DNA, 15 bp, Homo sapiens
tattaatatgcaaga

SEQ ID NO: 56766 - DNA, 15 bp, Homo sapiens
attaatatgcaagac

SEQ ID NO: 56767 - DNA, 15 bp, Homo sapiens
ttaatatgcaagacc

SEQ ID NO: 56768 - DNA, 15 bp, Homo sapiens
taatatgcaagacca

SEQ ID NO: 56769 - DNA, 15 bp, Homo sapiens
aatatgcaagaccaa

SEQ ID NO: 56770 - DNA, 15 bp, Homo sapiens
atatgcaagaccaag

SEQ ID NO: 56771 - DNA, 15 bp, Homo sapiens
tatgcaagaccaagg

SEQ ID NO: 56772 - DNA, 15 bp, Homo sapiens
atgcaagaccaaggg

SEQ ID NO: 56773 - DNA, 15 bp, Homo sapiens
tgcaagaccaagggg

SEQ ID NO: 56774 - DNA, 15 bp, Homo sapiens
gcaagaccaaggggt

SEQ ID NO: 56775 - DNA, 15 bp, Homo sapiens
caagaccaaggggta

SEQ ID NO: 56776 - DNA, 15 bp, Homo sapiens
aagaccaaggggtat

SEQ ID NO: 56777 - DNA, 15 bp, Homo sapiens
agaccaaggggtata

SEQ ID NO: 56778 - DNA, 15 bp, Homo sapiens
gaccaaggggtataa

SEQ ID NO: 56779 - DNA, 15 bp, Homo sapiens
accaaggggtataaa

SEQ ID NO: 56780 - DNA, 15 bp, Homo sapiens
ccaaggggtataaaa

SEQ ID NO: 56781 - DNA, 15 bp, Homo sapiens
caaggggtataaaag

SEQ ID NO: 56782 - DNA, 15 bp, Homo sapiens
aaggggtataaaagt

SEQ ID NO: 56783 - DNA, 15 bp, Homo sapiens
aggggtataaaagta

SEQ ID NO: 56784 - DNA, 15 bp, Homo sapiens
ggggtataaaagtag

SEQ ID NO: 56785 - DNA, 15 bp, Homo sapiens
gggtataaaagtagg

SEQ ID NO: 56786 - DNA, 15 bp, Homo sapiens
ggtataaaagtaggc

SEQ ID NO: 56787 - DNA, 15 bp, Homo sapiens
gtataaaagtaggct

SEQ ID NO: 56788 - DNA, 15 bp, Homo sapiens
tataaaagtaggcta

SEQ ID NO: 56789 - DNA, 15 bp, Homo sapiens
ataaaagtaggctag

SEQ ID NO: 56790 - DNA, 15 bp, Homo sapiens
taaaagtaggctagg

SEQ ID NO: 56791 - DNA, 15 bp, Homo sapiens
aaaagtaggctaggt

SEQ ID NO: 56792 - DNA, 15 bp, Homo sapiens
aaagtaggctaggtt

SEQ ID NO: 56793 - DNA, 15 bp, Homo sapiens
aagtaggctaggtta

SEQ ID NO: 56794 - DNA, 15 bp, Homo sapiens
agtaggctaggttac

SEQ ID NO: 56795 - DNA, 15 bp, Homo sapiens
gtaggctaggttact

SEQ ID NO: 56796 - DNA, 15 bp, Homo sapiens
taggctaggttactg

SEQ ID NO: 56797 - DNA, 15 bp, Homo sapiens
aggctaggttactgt

SEQ ID NO: 56798 - DNA, 15 bp, Homo sapiens
ggctaggttactgtt

SEQ ID NO: 56799 - DNA, 15 bp, Homo sapiens
gctaggttactgtta

SEQ ID NO: 56800 - DNA, 15 bp, Homo sapiens
ctaggttactgttaa

SEQ ID NO: 56801 - DNA, 15 bp, Homo sapiens
taggttactgttaat

SEQ ID NO: 56802 - DNA, 15 bp, Homo sapiens
aggttactgttaatt

SEQ ID NO: 56803 - DNA, 15 bp, Homo sapiens
ggttactgttaattt

SEQ ID NO: 56804 - DNA, 15 bp, Homo sapiens
gttactgttaattta

SEQ ID NO: 56805 - DNA, 15 bp, Homo sapiens
ttactgttaatttaa

SEQ ID NO: 56806 - DNA, 15 bp, Homo sapiens
tactgttaatttaat

SEQ ID NO: 56807 - DNA, 15 bp, Homo sapiens
actgttaatttaata

SEQ ID NO: 56808 - DNA, 15 bp, Homo sapiens
ctgttaatttaatag

SEQ ID NO: 56809 - DNA, 15 bp, Homo sapiens
tgttaatttaatagc

SEQ ID NO: 56810 - DNA, 15 bp, Homo sapiens
gttaatttaatagca

SEQ ID NO: 56811 - DNA, 15 bp, Homo sapiens
ttaatttaatagcat

SEQ ID NO: 56812 - DNA, 15 bp, Homo sapiens
taatttaatagcatc

SEQ ID NO: 56813 - DNA, 15 bp, Homo sapiens
aatttaatagcatct

SEQ ID NO: 56814 - DNA, 15 bp, Homo sapiens
atttaatagcatcta

SEQ ID NO: 56815 - DNA, 15 bp, Homo sapiens
tttaatagcatctag

SEQ ID NO: 56816 - DNA, 15 bp, Homo sapiens
ttaatagcatctagg

SEQ ID NO: 56817 - DNA, 15 bp, Homo sapiens
taatagcatctaggt

SEQ ID NO: 56818 - DNA, 15 bp, Homo sapiens
aatagcatctaggtt

SEQ ID NO: 56819 - DNA, 15 bp, Homo sapiens
atagcatctaggtta

SEQ ID NO: 56820 - DNA, 15 bp, Homo sapiens
tagcatctaggttaa

SEQ ID NO: 56821 - DNA, 15 bp, Homo sapiens
agcatctaggttaaa

SEQ ID NO: 56822 - DNA, 15 bp, Homo sapiens
gcatctaggttaaaa

SEQ ID NO: 56823 - DNA, 15 bp, Homo sapiens
catctaggttaaaat

SEQ ID NO: 56824 - DNA, 15 bp, Homo sapiens
atctaggttaaaatt

SEQ ID NO: 56825 - DNA, 15 bp, Homo sapiens
tctaggttaaaattc

SEQ ID NO: 56826 - DNA, 15 bp, Homo sapiens
ctaggttaaaattct

SEQ ID NO: 56827 - DNA, 15 bp, Homo sapiens
taggttaaaattctc

SEQ ID NO: 56828 - DNA, 15 bp, Homo sapiens
aggttaaaattctct

SEQ ID NO: 56829 - DNA, 15 bp, Homo sapiens
ggttaaaattctctc

SEQ ID NO: 56830 - DNA, 15 bp, Homo sapiens
gttaaaattctctct

SEQ ID NO: 56831 - DNA, 15 bp, Homo sapiens
ttaaaattctctctc

SEQ ID NO: 56832 - DNA, 15 bp, Homo sapiens
taaaattctctctct

SEQ ID NO: 56833 - DNA, 15 bp, Homo sapiens
aaaattctctctctt

SEQ ID NO: 56834 - DNA, 15 bp, Homo sapiens
aaattctctctcttt

SEQ ID NO: 56835 - DNA, 15 bp, Homo sapiens
aattctctctctttc

SEQ ID NO: 56836 - DNA, 15 bp, Homo sapiens
attctctctctttcc

SEQ ID NO: 56837 - DNA, 15 bp, Homo sapiens
ttctctctctttcct

SEQ ID NO: 56838 - DNA, 15 bp, Homo sapiens
tctctctctttcctc

SEQ ID NO: 56839 - DNA, 15 bp, Homo sapiens
ctctctctttcctct

SEQ ID NO: 56840 - DNA, 15 bp, Homo sapiens
tctctctttcctctt

SEQ ID NO: 56841 - DNA, 15 bp, Homo sapiens
ctctctttcctcttt

SEQ ID NO: 56842 - DNA, 15 bp, Homo sapiens
tctctttcctctttc

SEQ ID NO: 56843 - DNA, 15 bp, Homo sapiens
ctctttcctctttct

SEQ ID NO: 56844 - DNA, 15 bp, Homo sapiens
tctttcctctttctt

SEQ ID NO: 56845 - DNA, 15 bp, Homo sapiens
ctttcctctttcttc

SEQ ID NO: 56846 - DNA, 15 bp, Homo sapiens
tttcctctttcttcc

SEQ ID NO: 56847 - DNA, 15 bp, Homo sapiens
ttcctctttcttccc

SEQ ID NO: 56848 - DNA, 15 bp, Homo sapiens
tcctctttcttccct

SEQ ID NO: 56849 - DNA, 15 bp, Homo sapiens
cctctttcttccctt

SEQ ID NO: 56850 - DNA, 15 bp, Homo sapiens
ctctttcttcccttc

SEQ ID NO: 56851 - DNA, 15 bp, Homo sapiens
tctttcttcccttct

SEQ ID NO: 56852 - DNA, 15 bp, Homo sapiens
ctttcttcccttctt

SEQ ID NO: 56853 - DNA, 15 bp, Homo sapiens
tttcttcccttcttc

SEQ ID NO: 56854 - DNA, 15 bp, Homo sapiens
ttcttcccttcttct

SEQ ID NO: 56855 - DNA, 15 bp, Homo sapiens
tcttcccttcttctc

SEQ ID NO: 56856 - DNA, 15 bp, Homo sapiens
cttcccttcttctct

SEQ ID NO: 56857 - DNA, 15 bp, Homo sapiens
ttcccttcttctctc

SEQ ID NO: 56858 - DNA, 15 bp, Homo sapiens
tcccttcttctctcc

SEQ ID NO: 56859 - DNA, 15 bp, Homo sapiens
cccttcttctctcca

SEQ ID NO: 56860 - DNA, 15 bp, Homo sapiens
ccttcttctctccat

SEQ ID NO: 56861 - DNA, 15 bp, Homo sapiens
cttcttctctccatc

SEQ ID NO: 56862 - DNA, 15 bp, Homo sapiens
ttcttctctccatca

SEQ ID NO: 56863 - DNA, 15 bp, Homo sapiens
tcttctctccatcac

SEQ ID NO: 56864 - DNA, 15 bp, Homo sapiens
cttctctccatcacc

SEQ ID NO: 56865 - DNA, 15 bp, Homo sapiens
ttctctccatcacct

SEQ ID NO: 56866 - DNA, 15 bp, Homo sapiens
tctctccatcacctt

SEQ ID NO: 56867 - DNA, 15 bp, Homo sapiens
ctctccatcaccttc

SEQ ID NO: 56868 - DNA, 15 bp, Homo sapiens
tctccatcaccttct

SEQ ID NO: 56869 - DNA, 15 bp, Homo sapiens
ctccatcaccttcta

SEQ ID NO: 56870 - DNA, 15 bp, Homo sapiens
tccatcaccttctag

SEQ ID NO: 56871 - DNA, 15 bp, Homo sapiens
ccatcaccttctagt

SEQ ID NO: 56872 - DNA, 15 bp, Homo sapiens
catcaccttctagtc

SEQ ID NO: 56873 - DNA, 15 bp, Homo sapiens
atcaccttctagtct

SEQ ID NO: 56874 - DNA, 15 bp, Homo sapiens
tcaccttctagtctt

SEQ ID NO: 56875 - DNA, 15 bp, Homo sapiens
caccttctagtcttc

SEQ ID NO: 56876 - DNA, 15 bp, Homo sapiens
accttctagtcttct

SEQ ID NO: 56877 - DNA, 15 bp, Homo sapiens
ccttctagtcttctg

SEQ ID NO: 56878 - DNA, 15 bp, Homo sapiens
cttctagtcttctga

SEQ ID NO: 56879 - DNA, 15 bp, Homo sapiens
ttctagtcttctgac

SEQ ID NO: 56880 - DNA, 15 bp, Homo sapiens
tctagtcttctgact

SEQ ID NO: 56881 - DNA, 15 bp, Homo sapiens
ctagtcttctgactg

SEQ ID NO: 56882 - DNA, 15 bp, Homo sapiens
tagtcttctgactga

SEQ ID NO: 56883 - DNA, 15 bp, Homo sapiens
agtcttctgactgat

SEQ ID NO: 56884 - DNA, 15 bp, Homo sapiens
gtcttctgactgatt

SEQ ID NO: 56885 - DNA, 15 bp, Homo sapiens
tcttctgactgattc

SEQ ID NO: 56886 - DNA, 15 bp, Homo sapiens
cttctgactgattcc

SEQ ID NO: 56887 - DNA, 15 bp, Homo sapiens
ttctgactgattcca

SEQ ID NO: 56888 - DNA, 15 bp, Homo sapiens
tctgactgattccaa

SEQ ID NO: 56889 - DNA, 15 bp, Homo sapiens
ctgactgattccaaa

SEQ ID NO: 56890 - DNA, 15 bp, Homo sapiens
tgactgattccaaac

SEQ ID NO: 56891 - DNA, 15 bp, Homo sapiens
gactgattccaaaca

SEQ ID NO: 56892 - DNA, 15 bp, Homo sapiens
actgattccaaacag

SEQ ID NO: 56893 - DNA, 15 bp, Homo sapiens
ctgattccaaacagg

SEQ ID NO: 56894 - DNA, 15 bp, Homo sapiens
tgattccaaacagga

SEQ ID NO: 56895 - DNA, 15 bp, Homo sapiens
gattccaaacaggac

SEQ ID NO: 56896 - DNA, 15 bp, Homo sapiens
attccaaacaggaca

SEQ ID NO: 56897 - DNA, 15 bp, Homo sapiens
ttccaaacaggacaa

SEQ ID NO: 56898 - DNA, 15 bp, Homo sapiens
tccaaacaggacaat

SEQ ID NO: 56899 - DNA, 15 bp, Homo sapiens
ccaaacaggacaatt

SEQ ID NO: 56900 - DNA, 15 bp, Homo sapiens
caaacaggacaattg

SEQ ID NO: 56901 - DNA, 15 bp, Homo sapiens
aaacaggacaattga

SEQ ID NO: 56902 - DNA, 15 bp, Homo sapiens
aacaggacaattgaa

SEQ ID NO: 56903 - DNA, 15 bp, Homo sapiens
acaggacaattgaaa

SEQ ID NO: 56904 - DNA, 15 bp, Homo sapiens
caggacaattgaaat

SEQ ID NO: 56905 - DNA, 15 bp, Homo sapiens
aggacaattgaaatg

SEQ ID NO: 56906 - DNA, 15 bp, Homo sapiens
ggacaattgaaatgt

SEQ ID NO: 56907 - DNA, 15 bp, Homo sapiens
gacaattgaaatgtc

SEQ ID NO: 56908 - DNA, 15 bp, Homo sapiens
acaattgaaatgtct

SEQ ID NO: 56909 - DNA, 15 bp, Homo sapiens
caattgaaatgtctt

SEQ ID NO: 56910 - DNA, 15 bp, Homo sapiens
aattgaaatgtcttg

SEQ ID NO: 56911 - DNA, 15 bp, Homo sapiens
attgaaatgtcttgc

SEQ ID NO: 56912 - DNA, 15 bp, Homo sapiens
ttgaaatgtcttgcc

SEQ ID NO: 56913 - DNA, 15 bp, Homo sapiens
tgaaatgtcttgcct

SEQ ID NO: 56914 - DNA, 15 bp, Homo sapiens
gaaatgtcttgcctt

SEQ ID NO: 56915 - DNA, 15 bp, Homo sapiens
aaatgtcttgccttc

SEQ ID NO: 56916 - DNA, 15 bp, Homo sapiens
aatgtcttgccttca

SEQ ID NO: 56917 - DNA, 15 bp, Homo sapiens
atgtcttgccttcat

SEQ ID NO: 56918 - DNA, 15 bp, Homo sapiens
tgtcttgccttcatg

SEQ ID NO: 56919 - DNA, 15 bp, Homo sapiens
gtcttgccttcatgc

SEQ ID NO: 56920 - DNA, 15 bp, Homo sapiens
tcttgccttcatgct

SEQ ID NO: 56921 - DNA, 15 bp, Homo sapiens
cttgccttcatgctg

SEQ ID NO: 56922 - DNA, 15 bp, Homo sapiens
ttgccttcatgctga

SEQ ID NO: 56923 - DNA, 15 bp, Homo sapiens
tgccttcatgctgaa

SEQ ID NO: 56924 - DNA, 15 bp, Homo sapiens
gccttcatgctgaag

SEQ ID NO: 56925 - DNA, 15 bp, Homo sapiens
ccttcatgctgaaga

SEQ ID NO: 56926 - DNA, 15 bp, Homo sapiens
cttcatgctgaagag

SEQ ID NO: 56927 - DNA, 15 bp, Homo sapiens
ttcatgctgaagagc

SEQ ID NO: 56928 - DNA, 15 bp, Homo sapiens
tcatgctgaagagct

SEQ ID NO: 56929 - DNA, 15 bp, Homo sapiens
catgctgaagagctc

SEQ ID NO: 56930 - DNA, 15 bp, Homo sapiens
atgctgaagagctct

SEQ ID NO: 56931 - DNA, 15 bp, Homo sapiens
tgctgaagagctctt

SEQ ID NO: 56932 - DNA, 15 bp, Homo sapiens
gctgaagagctcttt

SEQ ID NO: 56933 - DNA, 15 bp, Homo sapiens
ctgaagagctctttg

SEQ ID NO: 56934 - DNA, 15 bp, Homo sapiens
tgaagagctctttgt

SEQ ID NO: 56935 - DNA, 15 bp, Homo sapiens
gaagagctctttgta

SEQ ID NO: 56936 - DNA, 15 bp, Homo sapiens
aagagctctttgtaa

SEQ ID NO: 56937 - DNA, 15 bp, Homo sapiens
agagctctttgtaaa

SEQ ID NO: 56938 - DNA, 15 bp, Homo sapiens
gagctctttgtaaat

SEQ ID NO: 56939 - DNA, 15 bp, Homo sapiens
agctctttgtaaata

SEQ ID NO: 56940 - DNA, 15 bp, Homo sapiens
gctctttgtaaatac

SEQ ID NO: 56941 - DNA, 15 bp, Homo sapiens
ctctttgtaaataca

SEQ ID NO: 56942 - DNA, 15 bp, Homo sapiens
tctttgtaaatacac

SEQ ID NO: 56943 - DNA, 15 bp, Homo sapiens
ctttgtaaatacaca

SEQ ID NO: 56944 - DNA, 15 bp, Homo sapiens
tttgtaaatacacat

SEQ ID NO: 56945 - DNA, 15 bp, Homo sapiens
ttgtaaatacacata

SEQ ID NO: 56946 - DNA, 15 bp, Homo sapiens
tgtaaatacacataa

SEQ ID NO: 56947 - DNA, 15 bp, Homo sapiens
gtaaatacacataaa

SEQ ID NO: 56948 - DNA, 15 bp, Homo sapiens
taaatacacataaac

SEQ ID NO: 56949 - DNA, 15 bp, Homo sapiens
aaatacacataaaca

SEQ ID NO: 56950 - DNA, 15 bp, Homo sapiens
aatacacataaacag

SEQ ID NO: 56951 - DNA, 15 bp, Homo sapiens
atacacataaacagt

SEQ ID NO: 56952 - DNA, 15 bp, Homo sapiens
tacacataaacagtg

SEQ ID NO: 56953 - DNA, 15 bp, Homo sapiens
acacataaacagtga

SEQ ID NO: 56954 - DNA, 15 bp, Homo sapiens
cacataaacagtgaa

SEQ ID NO: 56955 - DNA, 15 bp, Homo sapiens
acataaacagtgaat

SEQ ID NO: 56956 - DNA, 15 bp, Homo sapiens
cataaacagtgaata

SEQ ID NO: 56957 - DNA, 15 bp, Homo sapiens
ataaacagtgaatat

SEQ ID NO: 56958 - DNA, 15 bp, Homo sapiens
taaacagtgaatatc

SEQ ID NO: 56959 - DNA, 15 bp, Homo sapiens
aaacagtgaatatca

SEQ ID NO: 56960 - DNA, 15 bp, Homo sapiens
aacagtgaatatcag

SEQ ID NO: 56961 - DNA, 15 bp, Homo sapiens
acagtgaatatcagg

SEQ ID NO: 56962 - DNA, 15 bp, Homo sapiens
cagtgaatatcaggt

SEQ ID NO: 56963 - DNA, 15 bp, Homo sapiens
agtgaatatcaggtg

SEQ ID NO: 56964 - DNA, 15 bp, Homo sapiens
gtgaatatcaggtgc

SEQ ID NO: 56965 - DNA, 15 bp, Homo sapiens
tgaatatcaggtgca

SEQ ID NO: 56966 - DNA, 15 bp, Homo sapiens
gaatatcaggtgcac

SEQ ID NO: 56967 - DNA, 15 bp, Homo sapiens
aatatcaggtgcacc

SEQ ID NO: 56968 - DNA, 15 bp, Homo sapiens
atatcaggtgcacca

SEQ ID NO: 56969 - DNA, 15 bp, Homo sapiens
tatcaggtgcaccat

SEQ ID NO: 56970 - DNA, 15 bp, Homo sapiens
atcaggtgcaccatt

SEQ ID NO: 56971 - DNA, 15 bp, Homo sapiens
tcaggtgcaccattt

SEQ ID NO: 56972 - DNA, 15 bp, Homo sapiens
caggtgcaccatttt

SEQ ID NO: 56973 - DNA, 15 bp, Homo sapiens
aggtgcaccattttt

SEQ ID NO: 56974 - DNA, 15 bp, Homo sapiens
ggtgcaccattttta

SEQ ID NO: 56975 - DNA, 15 bp, Homo sapiens
gtgcaccatttttaa

SEQ ID NO: 56976 - DNA, 15 bp, Homo sapiens
tgcaccatttttaaa

SEQ ID NO: 56977 - DNA, 15 bp, Homo sapiens
gcaccatttttaaag

SEQ ID NO: 56978 - DNA, 15 bp, Homo sapiens
caccatttttaaagt

SEQ ID NO: 56979 - DNA, 15 bp, Homo sapiens
accatttttaaagtg

SEQ ID NO: 56980 - DNA, 15 bp, Homo sapiens
ccatttttaaagtgc

SEQ ID NO: 56981 - DNA, 15 bp, Homo sapiens
catttttaaagtgct

SEQ ID NO: 56982 - DNA, 15 bp, Homo sapiens
atttttaaagtgcta

SEQ ID NO: 56983 - DNA, 15 bp, Homo sapiens
tttttaaagtgctat

SEQ ID NO: 56984 - DNA, 15 bp, Homo sapiens
ttttaaagtgctatt

SEQ ID NO: 56985 - DNA, 15 bp, Homo sapiens
tttaaagtgctattc

SEQ ID NO: 56986 - DNA, 15 bp, Homo sapiens
ttaaagtgctattca

SEQ ID NO: 56987 - DNA, 15 bp, Homo sapiens
taaagtgctattcat

SEQ ID NO: 56988 - DNA, 15 bp, Homo sapiens
aaagtgctattcatt

SEQ ID NO: 56989 - DNA, 15 bp, Homo sapiens
aagtgctattcattt

SEQ ID NO: 56990 - DNA, 15 bp, Homo sapiens
agtgctattcatttc

SEQ ID NO: 56991 - DNA, 15 bp, Homo sapiens
gtgctattcatttcc

SEQ ID NO: 56992 - DNA, 15 bp, Homo sapiens
tgctattcatttcca

SEQ ID NO: 56993 - DNA, 15 bp, Homo sapiens
gctattcatttccac

SEQ ID NO: 56994 - DNA, 15 bp, Homo sapiens
ctattcatttccaca

SEQ ID NO: 56995 - DNA, 15 bp, Homo sapiens
tattcatttccacaa

SEQ ID NO: 56996 - DNA, 15 bp, Homo sapiens
attcatttccacaac

SEQ ID NO: 56997 - DNA, 15 bp, Homo sapiens
ttcatttccacaaca

SEQ ID NO: 56998 - DNA, 15 bp, Homo sapiens
tcatttccacaacag

SEQ ID NO: 56999 - DNA, 15 bp, Homo sapiens
catttccacaacagt

SEQ ID NO: 57000 - DNA, 15 bp, Homo sapiens
atttccacaacagtt

SEQ ID NO: 57001 - DNA, 15 bp, Homo sapiens
tttccacaacagttt

SEQ ID NO: 57002 - DNA, 15 bp, Homo sapiens
ttccacaacagttta

SEQ ID NO: 57003 - DNA, 15 bp, Homo sapiens
tccacaacagtttag

SEQ ID NO: 57004 - DNA, 15 bp, Homo sapiens
ccacaacagtttagg

SEQ ID NO: 57005 - DNA, 15 bp, Homo sapiens
cacaacagtttaggt

SEQ ID NO: 57006 - DNA, 15 bp, Homo sapiens
acaacagtttaggtg

SEQ ID NO: 57007 - DNA, 15 bp, Homo sapiens
caacagtttaggtga

SEQ ID NO: 57008 - DNA, 15 bp, Homo sapiens
aacagtttaggtgaa

SEQ ID NO: 57009 - DNA, 15 bp, Homo sapiens
acagtttaggtgaaa

SEQ ID NO: 57010 - DNA, 15 bp, Homo sapiens
cagtttaggtgaaac

SEQ ID NO: 57011 - DNA, 15 bp, Homo sapiens
agtttaggtgaaacc

SEQ ID NO: 57012 - DNA, 15 bp, Homo sapiens
gtttaggtgaaacca

SEQ ID NO: 57013 - DNA, 15 bp, Homo sapiens
tttaggtgaaaccat

SEQ ID NO: 57014 - DNA, 15 bp, Homo sapiens
ttaggtgaaaccatg

SEQ ID NO: 57015 - DNA, 15 bp, Homo sapiens
taggtgaaaccatgt

SEQ ID NO: 57016 - DNA, 15 bp, Homo sapiens
aggtgaaaccatgtc

SEQ ID NO: 57017 - DNA, 15 bp, Homo sapiens
ggtgaaaccatgtca

SEQ ID NO: 57018 - DNA, 15 bp, Homo sapiens
gtgaaaccatgtcat

SEQ ID NO: 57019 - DNA, 15 bp, Homo sapiens
tgaaaccatgtcatc

SEQ ID NO: 57020 - DNA, 15 bp, Homo sapiens
gaaaccatgtcatct

SEQ ID NO: 57021 - DNA, 15 bp, Homo sapiens
aaaccatgtcatctt

SEQ ID NO: 57022 - DNA, 15 bp, Homo sapiens
aaccatgtcatctta

SEQ ID NO: 57023 - DNA, 15 bp, Homo sapiens
accatgtcatcttac

SEQ ID NO: 57024 - DNA, 15 bp, Homo sapiens
ccatgtcatcttaca

SEQ ID NO: 57025 - DNA, 15 bp, Homo sapiens
catgtcatcttacaa

SEQ ID NO: 57026 - DNA, 15 bp, Homo sapiens
atgtcatcttacaag

SEQ ID NO: 57027 - DNA, 15 bp, Homo sapiens
tgtcatcttacaagt

SEQ ID NO: 57028 - DNA, 15 bp, Homo sapiens
gtcatcttacaagtt

SEQ ID NO: 57029 - DNA, 15 bp, Homo sapiens
tcatcttacaagttg

SEQ ID NO: 57030 - DNA, 15 bp, Homo sapiens
catcttacaagttga

SEQ ID NO: 57031 - DNA, 15 bp, Homo sapiens
atcttacaagttgag

SEQ ID NO: 57032 - DNA, 15 bp, Homo sapiens
tcttacaagttgagt

SEQ ID NO: 57033 - DNA, 15 bp, Homo sapiens
cttacaagttgagtg

SEQ ID NO: 57034 - DNA, 15 bp, Homo sapiens
ttacaagttgagtgt

SEQ ID NO: 57035 - DNA, 15 bp, Homo sapiens
tacaagttgagtgtg

SEQ ID NO: 57036 - DNA, 15 bp, Homo sapiens
acaagttgagtgtgt

SEQ ID NO: 57037 - DNA, 15 bp, Homo sapiens
caagttgagtgtgtg

SEQ ID NO: 57038 - DNA, 15 bp, Homo sapiens
aagttgagtgtgtgt

SEQ ID NO: 57039 - DNA, 15 bp, Homo sapiens
agttgagtgtgtgtg

SEQ ID NO: 57040 - DNA, 15 bp, Homo sapiens
gttgagtgtgtgtgt

SEQ ID NO: 57041 - DNA, 15 bp, Homo sapiens
ttgagtgtgtgtgtg

SEQ ID NO: 57042 - DNA, 15 bp, Homo sapiens
tgagtgtgtgtgtgt

SEQ ID NO: 57043 - DNA, 15 bp, Homo sapiens
tgtgtgtgtgtgtag

SEQ ID NO: 57044 - DNA, 15 bp, Homo sapiens
gtgtgtgtgtgtaga

SEQ ID NO: 57045 - DNA, 15 bp, Homo sapiens
tgtgtgtgtgtagag

SEQ ID NO: 57046 - DNA, 15 bp, Homo sapiens
gtgtgtgtgtagagg

SEQ ID NO: 57047 - DNA, 15 bp, Homo sapiens
tgtgtgtgtagagga

SEQ ID NO: 57048 - DNA, 15 bp, Homo sapiens
gtgtgtgtagaggat

SEQ ID NO: 57049 - DNA, 15 bp, Homo sapiens
tgtgtgtagaggatg

SEQ ID NO: 57050 - DNA, 15 bp, Homo sapiens
gtgtgtagaggatga

SEQ ID NO: 57051 - DNA, 15 bp, Homo sapiens
tgtgtagaggatgac

SEQ ID NO: 57052 - DNA, 15 bp, Homo sapiens
gtgtagaggatgacg

SEQ ID NO: 57053 - DNA, 15 bp, Homo sapiens
tgtagaggatgacgt

SEQ ID NO: 57054 - DNA, 15 bp, Homo sapiens
gtagaggatgacgtg

SEQ ID NO: 57055 - DNA, 15 bp, Homo sapiens
tagaggatgacgtga

SEQ ID NO: 57056 - DNA, 15 bp, Homo sapiens
agaggatgacgtgac

SEQ ID NO: 57057 - DNA, 15 bp, Homo sapiens
gaggatgacgtgaca

SEQ ID NO: 57058 - DNA, 15 bp, Homo sapiens
aggatgacgtgacac

SEQ ID NO: 57059 - DNA, 15 bp, Homo sapiens
ggatgacgtgacact

SEQ ID NO: 57060 - DNA, 15 bp, Homo sapiens
gatgacgtgacactt

SEQ ID NO: 57061 - DNA, 15 bp, Homo sapiens
atgacgtgacacttt

SEQ ID NO: 57062 - DNA, 15 bp, Homo sapiens
tgacgtgacactttt

SEQ ID NO: 57063 - DNA, 15 bp, Homo sapiens
gacgtgacacttttg

SEQ ID NO: 57064 - DNA, 15 bp, Homo sapiens
acgtgacacttttga

SEQ ID NO: 57065 - DNA, 15 bp, Homo sapiens
cgtgacacttttgag

SEQ ID NO: 57066 - DNA, 15 bp, Homo sapiens
gtgacacttttgagg

SEQ ID NO: 57067 - DNA, 15 bp, Homo sapiens
tgacacttttgaggt

SEQ ID NO: 57068 - DNA, 15 bp, Homo sapiens
gacacttttgaggtt

SEQ ID NO: 57069 - DNA, 15 bp, Homo sapiens
acacttttgaggttt

SEQ ID NO: 57070 - DNA, 15 bp, Homo sapiens
cacttttgaggttta

SEQ ID NO: 57071 - DNA, 15 bp, Homo sapiens
acttttgaggtttat

SEQ ID NO: 57072 - DNA, 15 bp, Homo sapiens
cttttgaggtttatt

SEQ ID NO: 57073 - DNA, 15 bp, Homo sapiens
ttttgaggtttattt

SEQ ID NO: 57074 - DNA, 15 bp, Homo sapiens
tttgaggtttattta

SEQ ID NO: 57075 - DNA, 15 bp, Homo sapiens
ttgaggtttatttaa

SEQ ID NO: 57076 - DNA, 15 bp, Homo sapiens
tgaggtttatttaag

SEQ ID NO: 57077 - DNA, 15 bp, Homo sapiens
gaggtttatttaagt

SEQ ID NO: 57078 - DNA, 15 bp, Homo sapiens
aggtttatttaagtt

SEQ ID NO: 57079 - DNA, 15 bp, Homo sapiens
ggtttatttaagttg

SEQ ID NO: 57080 - DNA, 15 bp, Homo sapiens
gtttatttaagttgt

SEQ ID NO: 57081 - DNA, 15 bp, Homo sapiens
tttatttaagttgtt

SEQ ID NO: 57082 - DNA, 15 bp, Homo sapiens
ttatttaagttgtta

SEQ ID NO: 57083 - DNA, 15 bp, Homo sapiens
tatttaagttgttaa

SEQ ID NO: 57084 - DNA, 15 bp, Homo sapiens
atttaagttgttaaa

SEQ ID NO: 57085 - DNA, 15 bp, Homo sapiens
tttaagttgttaaag

SEQ ID NO: 57086 - DNA, 15 bp, Homo sapiens
ttaagttgttaaaga

SEQ ID NO: 57087 - DNA, 15 bp, Homo sapiens
taagttgttaaagac

SEQ ID NO: 57088 - DNA, 15 bp, Homo sapiens
aagttgttaaagacc

SEQ ID NO: 57089 - DNA, 15 bp, Homo sapiens
agttgttaaagacct

SEQ ID NO: 57090 - DNA, 15 bp, Homo sapiens
gttgttaaagacctc

SEQ ID NO: 57091 - DNA, 15 bp, Homo sapiens
ttgttaaagacctca

SEQ ID NO: 57092 - DNA, 15 bp, Homo sapiens
tgttaaagacctcaa

SEQ ID NO: 57093 - DNA, 15 bp, Homo sapiens
gttaaagacctcaag

SEQ ID NO: 57094 - DNA, 15 bp, Homo sapiens
ttaaagacctcaagg

SEQ ID NO: 57095 - DNA, 15 bp, Homo sapiens
taaagacctcaaggt

SEQ ID NO: 57096 - DNA, 15 bp, Homo sapiens
aaagacctcaaggtt

SEQ ID NO: 57097 - DNA, 15 bp, Homo sapiens
aagacctcaaggtta

SEQ ID NO: 57098 - DNA, 15 bp, Homo sapiens
agacctcaaggttac

SEQ ID NO: 57099 - DNA, 15 bp, Homo sapiens
gacctcaaggttaca

SEQ ID NO: 57100 - DNA, 15 bp, Homo sapiens
acctcaaggttacaa

SEQ ID NO: 57101 - DNA, 15 bp, Homo sapiens
cctcaaggttacaag

SEQ ID NO: 57102 - DNA, 15 bp, Homo sapiens
ctcaaggttacaaga

SEQ ID NO: 57103 - DNA, 15 bp, Homo sapiens
tcaaggttacaagac

SEQ ID NO: 57104 - DNA, 15 bp, Homo sapiens
caaggttacaagact

SEQ ID NO: 57105 - DNA, 15 bp, Homo sapiens
aaggttacaagactt

SEQ ID NO: 57106 - DNA, 15 bp, Homo sapiens
aggttacaagactta

SEQ ID NO: 57107 - DNA, 15 bp, Homo sapiens
ggttacaagacttag

SEQ ID NO: 57108 - DNA, 15 bp, Homo sapiens
gttacaagacttaga

SEQ ID NO: 57109 - DNA, 15 bp, Homo sapiens
ttacaagacttagac

SEQ ID NO: 57110 - DNA, 15 bp, Homo sapiens
tacaagacttagact

SEQ ID NO: 57111 - DNA, 15 bp, Homo sapiens
acaagacttagactg

SEQ ID NO: 57112 - DNA, 15 bp, Homo sapiens
caagacttagactgt

SEQ ID NO: 57113 - DNA, 15 bp, Homo sapiens
aagacttagactgtt

SEQ ID NO: 57114 - DNA, 15 bp, Homo sapiens
agacttagactgtta

SEQ ID NO: 57115 - DNA, 15 bp, Homo sapiens
gacttagactgttaa

SEQ ID NO: 57116 - DNA, 15 bp, Homo sapiens
acttagactgttaag

SEQ ID NO: 57117 - DNA, 15 bp, Homo sapiens
cttagactgttaagc

SEQ ID NO: 57118 - DNA, 15 bp, Homo sapiens
ttagactgttaagca

SEQ ID NO: 57119 - DNA, 15 bp, Homo sapiens
tagactgttaagcat

SEQ ID NO: 57120 - DNA, 15 bp, Homo sapiens
agactgttaagcatt

SEQ ID NO: 57121 - DNA, 15 bp, Homo sapiens
gactgttaagcattt

SEQ ID NO: 57122 - DNA, 15 bp, Homo sapiens
actgttaagcatttt

SEQ ID NO: 57123 - DNA, 15 bp, Homo sapiens
ctgttaagcattttt

SEQ ID NO: 57124 - DNA, 15 bp, Homo sapiens
tgttaagcatttttc

SEQ ID NO: 57125 - DNA, 15 bp, Homo sapiens
gttaagcatttttcc

SEQ ID NO: 57126 - DNA, 15 bp, Homo sapiens
ttaagcatttttcct

SEQ ID NO: 57127 - DNA, 15 bp, Homo sapiens
taagcatttttcctc

SEQ ID NO: 57128 - DNA, 15 bp, Homo sapiens
aagcatttttcctcc

SEQ ID NO: 57129 - DNA, 15 bp, Homo sapiens
agcatttttcctccc

SEQ ID NO: 57130 - DNA, 15 bp, Homo sapiens
gcatttttcctccca

SEQ ID NO: 57131 - DNA, 15 bp, Homo sapiens
catttttcctcccag

SEQ ID NO: 57132 - DNA, 15 bp, Homo sapiens
atttttcctcccaga

SEQ ID NO: 57133 - DNA, 15 bp, Homo sapiens
tttttcctcccagag

SEQ ID NO: 57134 - DNA, 15 bp, Homo sapiens
ttttcctcccagaga

SEQ ID NO: 57135 - DNA, 15 bp, Homo sapiens
tttcctcccagagac

SEQ ID NO: 57136 - DNA, 15 bp, Homo sapiens
ttcctcccagagaca

SEQ ID NO: 57137 - DNA, 15 bp, Homo sapiens
tcctcccagagacac

SEQ ID NO: 57138 - DNA, 15 bp, Homo sapiens
cctcccagagacacg

SEQ ID NO: 57139 - DNA, 15 bp, Homo sapiens
ctcccagagacacga

SEQ ID NO: 57140 - DNA, 15 bp, Homo sapiens
tcccagagacacgaa

SEQ ID NO: 57141 - DNA, 15 bp, Homo sapiens
cccagagacacgaaa

SEQ ID NO: 57142 - DNA, 15 bp, Homo sapiens
ccagagacacgaaat

SEQ ID NO: 57143 - DNA, 15 bp, Homo sapiens
cagagacacgaaatc

SEQ ID NO: 57144 - DNA, 15 bp, Homo sapiens
agagacacgaaatct

SEQ ID NO: 57145 - DNA, 15 bp, Homo sapiens
gagacacgaaatcta

SEQ ID NO: 57146 - DNA, 15 bp, Homo sapiens
agacacgaaatctac

SEQ ID NO: 57147 - DNA, 15 bp, Homo sapiens
gacacgaaatctaca

SEQ ID NO: 57148 - DNA, 15 bp, Homo sapiens
acacgaaatctacaa

SEQ ID NO: 57149 - DNA, 15 bp, Homo sapiens
cacgaaatctacaat

SEQ ID NO: 57150 - DNA, 15 bp, Homo sapiens
acgaaatctacaatt

SEQ ID NO: 57151 - DNA, 15 bp, Homo sapiens
cgaaatctacaattt

SEQ ID NO: 57152 - DNA, 15 bp, Homo sapiens
gaaatctacaatttt

SEQ ID NO: 57153 - DNA, 15 bp, Homo sapiens
aaatctacaattttc

SEQ ID NO: 57154 - DNA, 15 bp, Homo sapiens
aatctacaattttct

SEQ ID NO: 57155 - DNA, 15 bp, Homo sapiens
atctacaattttctc

SEQ ID NO: 57156 - DNA, 15 bp, Homo sapiens
tctacaattttctcg

SEQ ID NO: 57157 - DNA, 15 bp, Homo sapiens
ctacaattttctcga

SEQ ID NO: 57158 - DNA, 15 bp, Homo sapiens
tacaattttctcgat

SEQ ID NO: 57159 - DNA, 15 bp, Homo sapiens
acaattttctcgatt

SEQ ID NO: 57160 - DNA, 15 bp, Homo sapiens
caattttctcgattc

SEQ ID NO: 57161 - DNA, 15 bp, Homo sapiens
aattttctcgattca

SEQ ID NO: 57162 - DNA, 15 bp, Homo sapiens
attttctcgattcaa

SEQ ID NO: 57163 - DNA, 15 bp, Homo sapiens
ttttctcgattcaac

SEQ ID NO: 57164 - DNA, 15 bp, Homo sapiens
tttctcgattcaact

SEQ ID NO: 57165 - DNA, 15 bp, Homo sapiens
ttctcgattcaactg

SEQ ID NO: 57166 - DNA, 15 bp, Homo sapiens
tctcgattcaactgt

SEQ ID NO: 57167 - DNA, 15 bp, Homo sapiens
ctcgattcaactgtc

SEQ ID NO: 57168 - DNA, 15 bp, Homo sapiens
tcgattcaactgtca

SEQ ID NO: 57169 - DNA, 15 bp, Homo sapiens
cgattcaactgtcaa

SEQ ID NO: 57170 - DNA, 15 bp, Homo sapiens
gattcaactgtcaac

SEQ ID NO: 57171 - DNA, 15 bp, Homo sapiens
attcaactgtcaact

SEQ ID NO: 57172 - DNA, 15 bp, Homo sapiens
ttcaactgtcaacta

SEQ ID NO: 57173 - DNA, 15 bp, Homo sapiens
tcaactgtcaactaa

SEQ ID NO: 57174 - DNA, 15 bp, Homo sapiens
caactgtcaactaaa

SEQ ID NO: 57175 - DNA, 15 bp, Homo sapiens
aactgtcaactaaat

SEQ ID NO: 57176 - DNA, 15 bp, Homo sapiens
actgtcaactaaatt

SEQ ID NO: 57177 - DNA, 15 bp, Homo sapiens
ctgtcaactaaattg

SEQ ID NO: 57178 - DNA, 15 bp, Homo sapiens
tgtcaactaaattgg

SEQ ID NO: 57179 - DNA, 15 bp, Homo sapiens
gtcaactaaattggc

SEQ ID NO: 57180 - DNA, 15 bp, Homo sapiens
tcaactaaattggca

SEQ ID NO: 57181 - DNA, 15 bp, Homo sapiens
caactaaattggcaa

SEQ ID NO: 57182 - DNA, 15 bp, Homo sapiens
aactaaattggcaag

SEQ ID NO: 57183 - DNA, 15 bp, Homo sapiens
actaaattggcaagt

SEQ ID NO: 57184 - DNA, 15 bp, Homo sapiens
ctaaattggcaagtc

SEQ ID NO: 57185 - DNA, 15 bp, Homo sapiens
taaattggcaagtca

SEQ ID NO: 57186 - DNA, 15 bp, Homo sapiens
aaattggcaagtcaa

SEQ ID NO: 57187 - DNA, 15 bp, Homo sapiens
aattggcaagtcaac

SEQ ID NO: 57188 - DNA, 15 bp, Homo sapiens
attggcaagtcaact

SEQ ID NO: 57189 - DNA, 15 bp, Homo sapiens
ttggcaagtcaacta

SEQ ID NO: 57190 - DNA, 15 bp, Homo sapiens
tggcaagtcaactaa

SEQ ID NO: 57191 - DNA, 15 bp, Homo sapiens
ggcaagtcaactaaa

SEQ ID NO: 57192 - DNA, 15 bp, Homo sapiens
gcaagtcaactaaaa

SEQ ID NO: 57193 - DNA, 15 bp, Homo sapiens
caagtcaactaaaag

SEQ ID NO: 57194 - DNA, 15 bp, Homo sapiens
aagtcaactaaaagg

SEQ ID NO: 57195 - DNA, 15 bp, Homo sapiens
agtcaactaaaagga

SEQ ID NO: 57196 - DNA, 15 bp, Homo sapiens
gtcaactaaaaggat

SEQ ID NO: 57197 - DNA, 15 bp, Homo sapiens
tcaactaaaaggata

SEQ ID NO: 57198 - DNA, 15 bp, Homo sapiens
caactaaaaggataa

SEQ ID NO: 57199 - DNA, 15 bp, Homo sapiens
aactaaaaggataat

SEQ ID NO: 57200 - DNA, 15 bp, Homo sapiens
actaaaaggataata

SEQ ID NO: 57201 - DNA, 15 bp, Homo sapiens
ctaaaaggataatat

SEQ ID NO: 57202 - DNA, 15 bp, Homo sapiens
taaaaggataatatt

SEQ ID NO: 57203 - DNA, 15 bp, Homo sapiens
aaaaggataatattc

SEQ ID NO: 57204 - DNA, 15 bp, Homo sapiens
aaaggataatattcc

SEQ ID NO: 57205 - DNA, 15 bp, Homo sapiens
aaggataatattccc

SEQ ID NO: 57206 - DNA, 15 bp, Homo sapiens
aggataatattccct

SEQ ID NO: 57207 - DNA, 15 bp, Homo sapiens
ggataatattccctt

SEQ ID NO: 57208 - DNA, 15 bp, Homo sapiens
gataatattccctta

SEQ ID NO: 57209 - DNA, 15 bp, Homo sapiens
ataatattcccttaa

SEQ ID NO: 57210 - DNA, 15 bp, Homo sapiens
taatattcccttaac

SEQ ID NO: 57211 - DNA, 15 bp, Homo sapiens
aatattcccttaacg

SEQ ID NO: 57212 - DNA, 15 bp, Homo sapiens
atattcccttaacga

SEQ ID NO: 57213 - DNA, 15 bp, Homo sapiens
tattcccttaacgat

SEQ ID NO: 57214 - DNA, 15 bp, Homo sapiens
attcccttaacgatg

SEQ ID NO: 57215 - DNA, 15 bp, Homo sapiens
ttcccttaacgatgc

SEQ ID NO: 57216 - DNA, 15 bp, Homo sapiens
tcccttaacgatgca

SEQ ID NO: 57217 - DNA, 15 bp, Homo sapiens
cccttaacgatgcat

SEQ ID NO: 57218 - DNA, 15 bp, Homo sapiens
ccttaacgatgcatt

SEQ ID NO: 57219 - DNA, 15 bp, Homo sapiens
cttaacgatgcattc

SEQ ID NO: 57220 - DNA, 15 bp, Homo sapiens
ttaacgatgcattca

SEQ ID NO: 57221 - DNA, 15 bp, Homo sapiens
taacgatgcattcat

SEQ ID NO: 57222 - DNA, 15 bp, Homo sapiens
aacgatgcattcatt

SEQ ID NO: 57223 - DNA, 15 bp, Homo sapiens
acgatgcattcattt

SEQ ID NO: 57224 - DNA, 15 bp, Homo sapiens
cgatgcattcatttg

SEQ ID NO: 57225 - DNA, 15 bp, Homo sapiens
gatgcattcatttga

SEQ ID NO: 57226 - DNA, 15 bp, Homo sapiens
atgcattcatttgaa

SEQ ID NO: 57227 - DNA, 15 bp, Homo sapiens
tgcattcatttgaag

SEQ ID NO: 57228 - DNA, 15 bp, Homo sapiens
gcattcatttgaagc

SEQ ID NO: 57229 - DNA, 15 bp, Homo sapiens
cattcatttgaagcc

SEQ ID NO: 57230 - DNA, 15 bp, Homo sapiens
attcatttgaagccc

SEQ ID NO: 57231 - DNA, 15 bp, Homo sapiens
ttcatttgaagccct

SEQ ID NO: 57232 - DNA, 15 bp, Homo sapiens
tcatttgaagcccta

SEQ ID NO: 57233 - DNA, 15 bp, Homo sapiens
catttgaagccctag

SEQ ID NO: 57234 - DNA, 15 bp, Homo sapiens
atttgaagccctagc

SEQ ID NO: 57235 - DNA, 15 bp, Homo sapiens
tttgaagccctagca

SEQ ID NO: 57236 - DNA, 15 bp, Homo sapiens
ttgaagccctagcaa

SEQ ID NO: 57237 - DNA, 15 bp, Homo sapiens
tgaagccctagcaac

SEQ ID NO: 57238 - DNA, 15 bp, Homo sapiens
gaagccctagcaact

SEQ ID NO: 57239 - DNA, 15 bp, Homo sapiens
aagccctagcaactg

SEQ ID NO: 57240 - DNA, 15 bp, Homo sapiens
agccctagcaactgt

SEQ ID NO: 57241 - DNA, 15 bp, Homo sapiens
gccctagcaactgta

SEQ ID NO: 57242 - DNA, 15 bp, Homo sapiens
ccctagcaactgtat

SEQ ID NO: 57243 - DNA, 15 bp, Homo sapiens
cctagcaactgtatt

SEQ ID NO: 57244 - DNA, 15 bp, Homo sapiens
ctagcaactgtatta

SEQ ID NO: 57245 - DNA, 15 bp, Homo sapiens
tagcaactgtattag

SEQ ID NO: 57246 - DNA, 15 bp, Homo sapiens
agcaactgtattagg

SEQ ID NO: 57247 - DNA, 15 bp, Homo sapiens
gcaactgtattaggc

SEQ ID NO: 57248 - DNA, 15 bp, Homo sapiens
caactgtattaggca

SEQ ID NO: 57249 - DNA, 15 bp, Homo sapiens
aactgtattaggcag

SEQ ID NO: 57250 - DNA, 15 bp, Homo sapiens
actgtattaggcagc

SEQ ID NO: 57251 - DNA, 15 bp, Homo sapiens
ctgtattaggcagca

SEQ ID NO: 57252 - DNA, 15 bp, Homo sapiens
tgtattaggcagcag

SEQ ID NO: 57253 - DNA, 15 bp, Homo sapiens
gtattaggcagcagc

SEQ ID NO: 57254 - DNA, 15 bp, Homo sapiens
tattaggcagcagcg

SEQ ID NO: 57255 - DNA, 15 bp, Homo sapiens
attaggcagcagcga

SEQ ID NO: 57256 - DNA, 15 bp, Homo sapiens
ttaggcagcagcgag

SEQ ID NO: 57257 - DNA, 15 bp, Homo sapiens
taggcagcagcgagt

SEQ ID NO: 57258 - DNA, 15 bp, Homo sapiens
aggcagcagcgagta

SEQ ID NO: 57259 - DNA, 15 bp, Homo sapiens
ggcagcagcgagtat

SEQ ID NO: 57260 - DNA, 15 bp, Homo sapiens
gcagcagcgagtatt

SEQ ID NO: 57261 - DNA, 15 bp, Homo sapiens
cagcagcgagtattc

SEQ ID NO: 57262 - DNA, 15 bp, Homo sapiens
agcagcgagtattcg

SEQ ID NO: 57263 - DNA, 15 bp, Homo sapiens
gcagcgagtattcgc

SEQ ID NO: 57264 - DNA, 15 bp, Homo sapiens
cagcgagtattcgct

SEQ ID NO: 57265 - DNA, 15 bp, Homo sapiens
agcgagtattcgcta

SEQ ID NO: 57266 - DNA, 15 bp, Homo sapiens
gcgagtattcgctag

SEQ ID NO: 57267 - DNA, 15 bp, Homo sapiens
cgagtattcgctagc

SEQ ID NO: 57268 - DNA, 15 bp, Homo sapiens
gagtattcgctagca

SEQ ID NO: 57269 - DNA, 15 bp, Homo sapiens
agtattcgctagcaa

SEQ ID NO: 57270 - DNA, 15 bp, Homo sapiens
gtattcgctagcaag

SEQ ID NO: 57271 - DNA, 15 bp, Homo sapiens
tattcgctagcaagg

SEQ ID NO: 57272 - DNA, 15 bp, Homo sapiens
attcgctagcaaggg

SEQ ID NO: 57273 - DNA, 15 bp, Homo sapiens
ttcgctagcaaggga

SEQ ID NO: 57274 - DNA, 15 bp, Homo sapiens
tcgctagcaagggat

SEQ ID NO: 57275 - DNA, 15 bp, Homo sapiens
cgctagcaagggatg

SEQ ID NO: 57276 - DNA, 15 bp, Homo sapiens
gctagcaagggatgg

SEQ ID NO: 57277 - DNA, 15 bp, Homo sapiens
ctagcaagggatggc

SEQ ID NO: 57278 - DNA, 15 bp, Homo sapiens
tagcaagggatggcg

SEQ ID NO: 57279 - DNA, 15 bp, Homo sapiens
agcaagggatggcgc

SEQ ID NO: 57280 - DNA, 15 bp, Homo sapiens
gcaagggatggcgcg

SEQ ID NO: 57281 - DNA, 15 bp, Homo sapiens
caagggatggcgcgg

SEQ ID NO: 57282 - DNA, 15 bp, Homo sapiens
aagggatggcgcggg

SEQ ID NO: 57283 - DNA, 15 bp, Homo sapiens
agggatggcgcgggg

SEQ ID NO: 57284 - DNA, 15 bp, Homo sapiens
gggatggcgcgggga

SEQ ID NO: 57285 - DNA, 15 bp, Homo sapiens
ggatggcgcggggag

SEQ ID NO: 57286 - DNA, 15 bp, Homo sapiens
gatggcgcggggaga

SEQ ID NO: 57287 - DNA, 15 bp, Homo sapiens
atggcgcggggagag

SEQ ID NO: 57288 - DNA, 15 bp, Homo sapiens
tggcgcggggagagg

SEQ ID NO: 57289 - DNA, 15 bp, Homo sapiens
ggcgcggggagaggg

SEQ ID NO: 57290 - DNA, 15 bp, Homo sapiens
gcgcggggagaggga

SEQ ID NO: 57291 - DNA, 15 bp, Homo sapiens
cgcggggagagggaa

SEQ ID NO: 57292 - DNA, 15 bp, Homo sapiens
gcggggagagggaac

SEQ ID NO: 57293 - DNA, 15 bp, Homo sapiens
cggggagagggaact

SEQ ID NO: 57294 - DNA, 15 bp, Homo sapiens
ggggagagggaactc

SEQ ID NO: 57295 - DNA, 15 bp, Homo sapiens
gggagagggaactct

SEQ ID NO: 57296 - DNA, 15 bp, Homo sapiens
ggagagggaactctg

SEQ ID NO: 57297 - DNA, 15 bp, Homo sapiens
gagagggaactctgc

SEQ ID NO: 57298 - DNA, 15 bp, Homo sapiens
agagggaactctgca

SEQ ID NO: 57299 - DNA, 15 bp, Homo sapiens
gagggaactctgcaa

SEQ ID NO: 57300 - DNA, 15 bp, Homo sapiens
agggaactctgcaat

SEQ ID NO: 57301 - DNA, 15 bp, Homo sapiens
gggaactctgcaatt

SEQ ID NO: 57302 - DNA, 15 bp, Homo sapiens
ggaactctgcaattt

SEQ ID NO: 57303 - DNA, 15 bp, Homo sapiens
gaactctgcaattta

SEQ ID NO: 57304 - DNA, 15 bp, Homo sapiens
aactctgcaatttag

SEQ ID NO: 57305 - DNA, 15 bp, Homo sapiens
actctgcaatttaga

SEQ ID NO: 57306 - DNA, 15 bp, Homo sapiens
ctctgcaatttagag

SEQ ID NO: 57307 - DNA, 15 bp, Homo sapiens
tctgcaatttagagt

SEQ ID NO: 57308 - DNA, 15 bp, Homo sapiens
ctgcaatttagagtg

SEQ ID NO: 57309 - DNA, 15 bp, Homo sapiens
tgcaatttagagtga

SEQ ID NO: 57310 - DNA, 15 bp, Homo sapiens
gcaatttagagtgac

SEQ ID NO: 57311 - DNA, 15 bp, Homo sapiens
caatttagagtgaca

SEQ ID NO: 57312 - DNA, 15 bp, Homo sapiens
aatttagagtgacag

SEQ ID NO: 57313 - DNA, 15 bp, Homo sapiens
atttagagtgacaga

SEQ ID NO: 57314 - DNA, 15 bp, Homo sapiens
tttagagtgacagat

SEQ ID NO: 57315 - DNA, 15 bp, Homo sapiens
ttagagtgacagatg

SEQ ID NO: 57316 - DNA, 15 bp, Homo sapiens
tagagtgacagatga

SEQ ID NO: 57317 - DNA, 15 bp, Homo sapiens
agagtgacagatgat

SEQ ID NO: 57318 - DNA, 15 bp, Homo sapiens
gagtgacagatgatt

SEQ ID NO: 57319 - DNA, 15 bp, Homo sapiens
agtgacagatgattt

SEQ ID NO: 57320 - DNA, 15 bp, Homo sapiens
gtgacagatgatttc

SEQ ID NO: 57321 - DNA, 15 bp, Homo sapiens
tgacagatgatttct

SEQ ID NO: 57322 - DNA, 15 bp, Homo sapiens
gacagatgatttctt

SEQ ID NO: 57323 - DNA, 15 bp, Homo sapiens
acagatgatttcttt

SEQ ID NO: 57324 - DNA, 15 bp, Homo sapiens
cagatgatttctttc

SEQ ID NO: 57325 - DNA, 15 bp, Homo sapiens
agatgatttctttcc

SEQ ID NO: 57326 - DNA, 15 bp, Homo sapiens
gatgatttctttccc

SEQ ID NO: 57327 - DNA, 15 bp, Homo sapiens
atgatttctttccca

SEQ ID NO: 57328 - DNA, 15 bp, Homo sapiens
tgatttctttcccat

SEQ ID NO: 57329 - DNA, 15 bp, Homo sapiens
gatttctttcccatc

SEQ ID NO: 57330 - DNA, 15 bp, Homo sapiens
atttctttcccatcc

SEQ ID NO: 57331 - DNA, 15 bp, Homo sapiens
tttctttcccatcca

SEQ ID NO: 57332 - DNA, 15 bp, Homo sapiens
ttctttcccatccat

SEQ ID NO: 57333 - DNA, 15 bp, Homo sapiens
tctttcccatccatc

SEQ ID NO: 57334 - DNA, 15 bp, Homo sapiens
ctttcccatccatca

SEQ ID NO: 57335 - DNA, 15 bp, Homo sapiens
tttcccatccatcaa

SEQ ID NO: 57336 - DNA, 15 bp, Homo sapiens
ttcccatccatcaag

SEQ ID NO: 57337 - DNA, 15 bp, Homo sapiens
tcccatccatcaagc

SEQ ID NO: 57338 - DNA, 15 bp, Homo sapiens
cccatccatcaagct

SEQ ID NO: 57339 - DNA, 15 bp, Homo sapiens
ccatccatcaagctg

SEQ ID NO: 57340 - DNA, 15 bp, Homo sapiens
catccatcaagctgc

SEQ ID NO: 57341 - DNA, 15 bp, Homo sapiens
atccatcaagctgcc

SEQ ID NO: 57342 - DNA, 15 bp, Homo sapiens
tccatcaagctgcct

SEQ ID NO: 57343 - DNA, 15 bp, Homo sapiens
ccatcaagctgcctc

SEQ ID NO: 57344 - DNA, 15 bp, Homo sapiens
catcaagctgcctca

SEQ ID NO: 57345 - DNA, 15 bp, Homo sapiens
atcaagctgcctcaa

SEQ ID NO: 57346 - DNA, 15 bp, Homo sapiens
tcaagctgcctcaaa

SEQ ID NO: 57347 - DNA, 15 bp, Homo sapiens
caagctgcctcaaaa

SEQ ID NO: 57348 - DNA, 15 bp, Homo sapiens
aagctgcctcaaaat

SEQ ID NO: 57349 - DNA, 15 bp, Homo sapiens
agctgcctcaaaatg

SEQ ID NO: 57350 - DNA, 15 bp, Homo sapiens
gctgcctcaaaatgt

SEQ ID NO: 57351 - DNA, 15 bp, Homo sapiens
ctgcctcaaaatgtc

SEQ ID NO: 57352 - DNA, 15 bp, Homo sapiens
tgcctcaaaatgtca

SEQ ID NO: 57353 - DNA, 15 bp, Homo sapiens
gcctcaaaatgtcac

SEQ ID NO: 57354 - DNA, 15 bp, Homo sapiens
cctcaaaatgtcaca

SEQ ID NO: 57355 - DNA, 15 bp, Homo sapiens
ctcaaaatgtcacaa

SEQ ID NO: 57356 - DNA, 15 bp, Homo sapiens
tcaaaatgtcacaat

SEQ ID NO: 57357 - DNA, 15 bp, Homo sapiens
caaaatgtcacaata

SEQ ID NO: 57358 - DNA, 15 bp, Homo sapiens
aaaatgtcacaatat

SEQ ID NO: 57359 - DNA, 15 bp, Homo sapiens
aaatgtcacaatatt

SEQ ID NO: 57360 - DNA, 15 bp, Homo sapiens
aatgtcacaatattt

SEQ ID NO: 57361 - DNA, 15 bp, Homo sapiens
atgtcacaatattta

SEQ ID NO: 57362 - DNA, 15 bp, Homo sapiens
tgtcacaatatttac

SEQ ID NO: 57363 - DNA, 15 bp, Homo sapiens
gtcacaatatttaca

SEQ ID NO: 57364 - DNA, 15 bp, Homo sapiens
tcacaatatttacac

SEQ ID NO: 57365 - DNA, 15 bp, Homo sapiens
cacaatatttacacc

SEQ ID NO: 57366 - DNA, 15 bp, Homo sapiens
acaatatttacacct

SEQ ID NO: 57367 - DNA, 15 bp, Homo sapiens
caatatttacacctc

SEQ ID NO: 57368 - DNA, 15 bp, Homo sapiens
aatatttacacctct

SEQ ID NO: 57369 - DNA, 15 bp, Homo sapiens
atatttacacctctt

SEQ ID NO: 57370 - DNA, 15 bp, Homo sapiens
tatttacacctcttt

SEQ ID NO: 57371 - DNA, 15 bp, Homo sapiens
atttacacctctttc

SEQ ID NO: 57372 - DNA, 15 bp, Homo sapiens
tttacacctctttct

SEQ ID NO: 57373 - DNA, 15 bp, Homo sapiens
ttacacctctttctt

SEQ ID NO: 57374 - DNA, 15 bp, Homo sapiens
tacacctctttcttg

SEQ ID NO: 57375 - DNA, 15 bp, Homo sapiens
acacctctttcttgg

SEQ ID NO: 57376 - DNA, 15 bp, Homo sapiens
cacctctttcttggt

SEQ ID NO: 57377 - DNA, 15 bp, Homo sapiens
acctctttcttggtg

SEQ ID NO: 57378 - DNA, 15 bp, Homo sapiens
cctctttcttggtga

SEQ ID NO: 57379 - DNA, 15 bp, Homo sapiens
ctctttcttggtgaa

SEQ ID NO: 57380 - DNA, 15 bp, Homo sapiens
tctttcttggtgaat

SEQ ID NO: 57381 - DNA, 15 bp, Homo sapiens
ctttcttggtgaatt

SEQ ID NO: 57382 - DNA, 15 bp, Homo sapiens
tttcttggtgaatta

SEQ ID NO: 57383 - DNA, 15 bp, Homo sapiens
ttcttggtgaattag

SEQ ID NO: 57384 - DNA, 15 bp, Homo sapiens
tcttggtgaattaga

SEQ ID NO: 57385 - DNA, 15 bp, Homo sapiens
cttggtgaattagaa

SEQ ID NO: 57386 - DNA, 15 bp, Homo sapiens
ttggtgaattagaat

SEQ ID NO: 57387 - DNA, 15 bp, Homo sapiens
tggtgaattagaatc

SEQ ID NO: 57388 - DNA, 15 bp, Homo sapiens
ggtgaattagaatcc

SEQ ID NO: 57389 - DNA, 15 bp, Homo sapiens
gtgaattagaatcca

SEQ ID NO: 57390 - DNA, 15 bp, Homo sapiens
tgaattagaatccag

SEQ ID NO: 57391 - DNA, 15 bp, Homo sapiens
gaattagaatccaga

SEQ ID NO: 57392 - DNA, 15 bp, Homo sapiens
aattagaatccagag

SEQ ID NO: 57393 - DNA, 15 bp, Homo sapiens
attagaatccagaga

SEQ ID NO: 57394 - DNA, 15 bp, Homo sapiens
ttagaatccagagac

SEQ ID NO: 57395 - DNA, 15 bp, Homo sapiens
tagaatccagagaca

SEQ ID NO: 57396 - DNA, 15 bp, Homo sapiens
agaatccagagacaa

SEQ ID NO: 57397 - DNA, 15 bp, Homo sapiens
gaatccagagacaag

SEQ ID NO: 57398 - DNA, 15 bp, Homo sapiens
aatccagagacaagc

SEQ ID NO: 57399 - DNA, 15 bp, Homo sapiens
atccagagacaagca

SEQ ID NO: 57400 - DNA, 15 bp, Homo sapiens
tccagagacaagcag

SEQ ID NO: 57401 - DNA, 15 bp, Homo sapiens
ccagagacaagcaga

SEQ ID NO: 57402 - DNA, 15 bp, Homo sapiens
cagagacaagcagac

SEQ ID NO: 57403 - DNA, 15 bp, Homo sapiens
agagacaagcagaca

SEQ ID NO: 57404 - DNA, 15 bp, Homo sapiens
gagacaagcagacag

SEQ ID NO: 57405 - DNA, 15 bp, Homo sapiens
agacaagcagacaga

SEQ ID NO: 57406 - DNA, 15 bp, Homo sapiens
gacaagcagacagaa

SEQ ID NO: 57407 - DNA, 15 bp, Homo sapiens
acaagcagacagaaa

SEQ ID NO: 57408 - DNA, 15 bp, Homo sapiens
caagcagacagaaag

SEQ ID NO: 57409 - DNA, 15 bp, Homo sapiens
aagcagacagaaaga

SEQ ID NO: 57410 - DNA, 15 bp, Homo sapiens
agcagacagaaagaa

SEQ ID NO: 57411 - DNA, 15 bp, Homo sapiens
gcagacagaaagaaa

SEQ ID NO: 57412 - DNA, 15 bp, Homo sapiens
cagacagaaagaaaa

SEQ ID NO: 57413 - DNA, 15 bp, Homo sapiens
agacagaaagaaaaa

SEQ ID NO: 57414 - DNA, 15 bp, Homo sapiens
gacagaaagaaaaaa

SEQ ID NO: 57415 - DNA, 15 bp, Homo sapiens
acagaaagaaaaaaa

SEQ ID NO: 57416 - DNA, 15 bp, Homo sapiens
cagaaagaaaaaaat

SEQ ID NO: 57417 - DNA, 15 bp, Homo sapiens
agaaagaaaaaaata

SEQ ID NO: 57418 - DNA, 15 bp, Homo sapiens
gaaagaaaaaaataa

SEQ ID NO: 57419 - DNA, 15 bp, Homo sapiens
aaagaaaaaaataat

SEQ ID NO: 57420 - DNA, 15 bp, Homo sapiens
aagaaaaaaataata

SEQ ID NO: 57421 - DNA, 15 bp, Homo sapiens
agaaaaaaataataa

SEQ ID NO: 57422 - DNA, 15 bp, Homo sapiens
gaaaaaaataataat

SEQ ID NO: 57423 - DNA, 15 bp, Homo sapiens
aaaaaaataataatt

SEQ ID NO: 57424 - DNA, 15 bp, Homo sapiens
aaaaaataataattc

SEQ ID NO: 57425 - DNA, 15 bp, Homo sapiens
aaaaataataattcc

SEQ ID NO: 57426 - DNA, 15 bp, Homo sapiens
aaaataataattccg

SEQ ID NO: 57427 - DNA, 15 bp, Homo sapiens
aaataataattccgg

SEQ ID NO: 57428 - DNA, 15 bp, Homo sapiens
aataataattccggc

SEQ ID NO: 57429 - DNA, 15 bp, Homo sapiens
ataataattccggcc

SEQ ID NO: 57430 - DNA, 15 bp, Homo sapiens
taataattccggccg

SEQ ID NO: 57431 - DNA, 15 bp, Homo sapiens
aataattccggccgg

SEQ ID NO: 57432 - DNA, 15 bp, Homo sapiens
ataattccggccggt

SEQ ID NO: 57433 - DNA, 15 bp, Homo sapiens
taattccggccggtt

SEQ ID NO: 57434 - DNA, 15 bp, Homo sapiens
aattccggccggttg

SEQ ID NO: 57435 - DNA, 15 bp, Homo sapiens
attccggccggttgc

SEQ ID NO: 57436 - DNA, 15 bp, Homo sapiens
ttccggccggttgcc

SEQ ID NO: 57437 - DNA, 15 bp, Homo sapiens
tccggccggttgccg

SEQ ID NO: 57438 - DNA, 15 bp, Homo sapiens
ccggccggttgccgc

SEQ ID NO: 57439 - DNA, 15 bp, Homo sapiens
cggccggttgccgcc

SEQ ID NO: 57440 - DNA, 15 bp, Homo sapiens
ggccggttgccgcct

SEQ ID NO: 57441 - DNA, 15 bp, Homo sapiens
gccggttgccgcctg

SEQ ID NO: 57442 - DNA, 15 bp, Homo sapiens
ccggttgccgcctga

SEQ ID NO: 57443 - DNA, 15 bp, Homo sapiens
cggttgccgcctgat

SEQ ID NO: 57444 - DNA, 15 bp, Homo sapiens
ggttgccgcctgatt

SEQ ID NO: 57445 - DNA, 15 bp, Homo sapiens
gttgccgcctgattg

SEQ ID NO: 57446 - DNA, 15 bp, Homo sapiens
ttgccgcctgattgg

SEQ ID NO: 57447 - DNA, 15 bp, Homo sapiens
tgccgcctgattgga

SEQ ID NO: 57448 - DNA, 15 bp, Homo sapiens
gccgcctgattggaa

SEQ ID NO: 57449 - DNA, 15 bp, Homo sapiens
ccgcctgattggaaa

SEQ ID NO: 57450 - DNA, 15 bp, Homo sapiens
cgcctgattggaaaa

SEQ ID NO: 57451 - DNA, 15 bp, Homo sapiens
gcctgattggaaaaa

SEQ ID NO: 57452 - DNA, 15 bp, Homo sapiens
cctgattggaaaaag

SEQ ID NO: 57453 - DNA, 15 bp, Homo sapiens
ctgattggaaaaagc

SEQ ID NO: 57454 - DNA, 15 bp, Homo sapiens
tgattggaaaaagca

SEQ ID NO: 57455 - DNA, 15 bp, Homo sapiens
gattggaaaaagcaa

SEQ ID NO: 57456 - DNA, 15 bp, Homo sapiens
attggaaaaagcaag

SEQ ID NO: 57457 - DNA, 15 bp, Homo sapiens
ttggaaaaagcaagc

SEQ ID NO: 57458 - DNA, 15 bp, Homo sapiens
tggaaaaagcaagcg

SEQ ID NO: 57459 - DNA, 15 bp, Homo sapiens
ggaaaaagcaagcgt

SEQ ID NO: 57460 - DNA, 15 bp, Homo sapiens
gaaaaagcaagcgtt

SEQ ID NO: 57461 - DNA, 15 bp, Homo sapiens
aaaaagcaagcgttg

SEQ ID NO: 57462 - DNA, 15 bp, Homo sapiens
aaaagcaagcgttgc

SEQ ID NO: 57463 - DNA, 15 bp, Homo sapiens
aaagcaagcgttgca

SEQ ID NO: 57464 - DNA, 15 bp, Homo sapiens
aagcaagcgttgcac

SEQ ID NO: 57465 - DNA, 15 bp, Homo sapiens
agcaagcgttgcacc

SEQ ID NO: 57466 - DNA, 15 bp, Homo sapiens
gcaagcgttgcacct

SEQ ID NO: 57467 - DNA, 15 bp, Homo sapiens
caagcgttgcacctt

SEQ ID NO: 57468 - DNA, 15 bp, Homo sapiens
aagcgttgcaccttt

SEQ ID NO: 57469 - DNA, 15 bp, Homo sapiens
agcgttgcaccttta

SEQ ID NO: 57470 - DNA, 15 bp, Homo sapiens
gcgttgcacctttaa

SEQ ID NO: 57471 - DNA, 15 bp, Homo sapiens
cgttgcacctttaaa

SEQ ID NO: 57472 - DNA, 15 bp, Homo sapiens
gttgcacctttaaat

SEQ ID NO: 57473 - DNA, 15 bp, Homo sapiens
ttgcacctttaaatt

SEQ ID NO: 57474 - DNA, 15 bp, Homo sapiens
tgcacctttaaattc

SEQ ID NO: 57475 - DNA, 15 bp, Homo sapiens
gcacctttaaattct

SEQ ID NO: 57476 - DNA, 15 bp, Homo sapiens
cacctttaaattctg

SEQ ID NO: 57477 - DNA, 15 bp, Homo sapiens
acctttaaattctgc

SEQ ID NO: 57478 - DNA, 15 bp, Homo sapiens
cctttaaattctgct

SEQ ID NO: 57479 - DNA, 15 bp, Homo sapiens
ctttaaattctgctc

SEQ ID NO: 57480 - DNA, 15 bp, Homo sapiens
tttaaattctgctcc

SEQ ID NO: 57481 - DNA, 15 bp, Homo sapiens
ttaaattctgctcct

SEQ ID NO: 57482 - DNA, 15 bp, Homo sapiens
taaattctgctcctc

SEQ ID NO: 57483 - DNA, 15 bp, Homo sapiens
aaattctgctcctcc

SEQ ID NO: 57484 - DNA, 15 bp, Homo sapiens
aattctgctcctcca

SEQ ID NO: 57485 - DNA, 15 bp, Homo sapiens
attctgctcctccat

SEQ ID NO: 57486 - DNA, 15 bp, Homo sapiens
ttctgctcctccatt

SEQ ID NO: 57487 - DNA, 15 bp, Homo sapiens
tctgctcctccattc

SEQ ID NO: 57488 - DNA, 15 bp, Homo sapiens
ctgctcctccattcc

SEQ ID NO: 57489 - DNA, 15 bp, Homo sapiens
tgctcctccattccc

SEQ ID NO: 57490 - DNA, 15 bp, Homo sapiens
gctcctccattcccc

SEQ ID NO: 57491 - DNA, 15 bp, Homo sapiens
ctcctccattccccg

SEQ ID NO: 57492 - DNA, 15 bp, Homo sapiens
tcctccattccccgt

SEQ ID NO: 57493 - DNA, 15 bp, Homo sapiens
cctccattccccgtt

SEQ ID NO: 57494 - DNA, 15 bp, Homo sapiens
ctccattccccgttc

SEQ ID NO: 57495 - DNA, 15 bp, Homo sapiens
tccattccccgttcc

SEQ ID NO: 57496 - DNA, 15 bp, Homo sapiens
ccattccccgttccg

SEQ ID NO: 57497 - DNA, 15 bp, Homo sapiens
cattccccgttccgc

SEQ ID NO: 57498 - DNA, 15 bp, Homo sapiens
attccccgttccgca

SEQ ID NO: 57499 - DNA, 15 bp, Homo sapiens
ttccccgttccgcac

SEQ ID NO: 57500 - DNA, 15 bp, Homo sapiens
tccccgttccgcaca

SEQ ID NO: 57501 - DNA, 15 bp, Homo sapiens
ccccgttccgcacac

SEQ ID NO: 57502 - DNA, 15 bp, Homo sapiens
cccgttccgcacacc

SEQ ID NO: 57503 - DNA, 15 bp, Homo sapiens
ccgttccgcacacca

SEQ ID NO: 57504 - DNA, 15 bp, Homo sapiens
cgttccgcacaccac

SEQ ID NO: 57505 - DNA, 15 bp, Homo sapiens
gttccgcacaccacc

SEQ ID NO: 57506 - DNA, 15 bp, Homo sapiens
ttccgcacaccaccc

SEQ ID NO: 57507 - DNA, 15 bp, Homo sapiens
tccgcacaccacccc

SEQ ID NO: 57508 - DNA, 15 bp, Homo sapiens
ccgcacaccaccccc

SEQ ID NO: 57509 - DNA, 15 bp, Homo sapiens
cgcacaccacccccc

SEQ ID NO: 57510 - DNA, 15 bp, Homo sapiens
gcacaccaccccccc

SEQ ID NO: 57511 - DNA, 15 bp, Homo sapiens
cacaccacccccccc

SEQ ID NO: 57512 - DNA, 15 bp, Homo sapiens
acaccaccccccccc

SEQ ID NO: 57513 - DNA, 15 bp, Homo sapiens
caccacccccccccg

SEQ ID NO: 57514 - DNA, 15 bp, Homo sapiens
accacccccccccgc

SEQ ID NO: 57515 - DNA, 15 bp, Homo sapiens
ccacccccccccgcc

SEQ ID NO: 57516 - DNA, 15 bp, Homo sapiens
cacccccccccgccc

SEQ ID NO: 57517 - DNA, 15 bp, Homo sapiens
acccccccccgcccc

SEQ ID NO: 57518 - DNA, 15 bp, Homo sapiens
cccccccccgcccct

SEQ ID NO: 57519 - DNA, 15 bp, Homo sapiens
ccccccccgcccctc

SEQ ID NO: 57520 - DNA, 15 bp, Homo sapiens
cccccccgcccctcc

SEQ ID NO: 57521 - DNA, 15 bp, Homo sapiens
ccccccgcccctccc

SEQ ID NO: 57522 - DNA, 15 bp, Homo sapiens
cccccgcccctcccg

SEQ ID NO: 57523 - DNA, 15 bp, Homo sapiens
ccccgcccctcccgg

SEQ ID NO: 57524 - DNA, 15 bp, Homo sapiens
cccgcccctcccggg

SEQ ID NO: 57525 - DNA, 15 bp, Homo sapiens
ccgcccctcccggga

SEQ ID NO: 57526 - DNA, 15 bp, Homo sapiens
cgcccctcccgggat

SEQ ID NO: 57527 - DNA, 15 bp, Homo sapiens
gcccctcccgggatt

SEQ ID NO: 57528 - DNA, 15 bp, Homo sapiens
cccctcccgggattt

SEQ ID NO: 57529 - DNA, 15 bp, Homo sapiens
ccctcccgggatttt

SEQ ID NO: 57530 - DNA, 15 bp, Homo sapiens
cctcccgggattttg

SEQ ID NO: 57531 - DNA, 15 bp, Homo sapiens
ctcccgggattttgc

SEQ ID NO: 57532 - DNA, 15 bp, Homo sapiens
tcccgggattttgca

SEQ ID NO: 57533 - DNA, 15 bp, Homo sapiens
cccgggattttgcaa

SEQ ID NO: 57534 - DNA, 15 bp, Homo sapiens
ccgggattttgcaat

SEQ ID NO: 57535 - DNA, 15 bp, Homo sapiens
cgggattttgcaata

SEQ ID NO: 57536 - DNA, 15 bp, Homo sapiens
gggattttgcaataa

SEQ ID NO: 57537 - DNA, 15 bp, Homo sapiens
ggattttgcaataaa

SEQ ID NO: 57538 - DNA, 15 bp, Homo sapiens
gattttgcaataaat

SEQ ID NO: 57539 - DNA, 15 bp, Homo sapiens
attttgcaataaatc

SEQ ID NO: 57540 - DNA, 15 bp, Homo sapiens
ttttgcaataaatct

SEQ ID NO: 57541 - DNA, 15 bp, Homo sapiens
tttgcaataaatctc

SEQ ID NO: 57542 - DNA, 15 bp, Homo sapiens
ttgcaataaatctcc

SEQ ID NO: 57543 - DNA, 15 bp, Homo sapiens
tgcaataaatctccc

SEQ ID NO: 57544 - DNA, 15 bp, Homo sapiens
gcaataaatctccca

SEQ ID NO: 57545 - DNA, 15 bp, Homo sapiens
caataaatctcccag

SEQ ID NO: 57546 - DNA, 15 bp, Homo sapiens
aataaatctcccagt

SEQ ID NO: 57547 - DNA, 15 bp, Homo sapiens
ataaatctcccagtt

SEQ ID NO: 57548 - DNA, 15 bp, Homo sapiens
taaatctcccagttc

SEQ ID NO: 57549 - DNA, 15 bp, Homo sapiens
aaatctcccagttct

SEQ ID NO: 57550 - DNA, 15 bp, Homo sapiens
aatctcccagttctg

SEQ ID NO: 57551 - DNA, 15 bp, Homo sapiens
atctcccagttctgc

SEQ ID NO: 57552 - DNA, 15 bp, Homo sapiens
tctcccagttctgcg

SEQ ID NO: 57553 - DNA, 15 bp, Homo sapiens
ctcccagttctgcgt

SEQ ID NO: 57554 - DNA, 15 bp, Homo sapiens
tcccagttctgcgtt

SEQ ID NO: 57555 - DNA, 15 bp, Homo sapiens
cccagttctgcgttc

SEQ ID NO: 57556 - DNA, 15 bp, Homo sapiens
ccagttctgcgttca

SEQ ID NO: 57557 - DNA, 15 bp, Homo sapiens
cagttctgcgttcag

SEQ ID NO: 57558 - DNA, 15 bp, Homo sapiens
agttctgcgttcagc

SEQ ID NO: 57559 - DNA, 15 bp, Homo sapiens
gttctgcgttcagcc

SEQ ID NO: 57560 - DNA, 15 bp, Homo sapiens
ttctgcgttcagccc

SEQ ID NO: 57561 - DNA, 15 bp, Homo sapiens
tctgcgttcagccct

SEQ ID NO: 57562 - DNA, 15 bp, Homo sapiens
ctgcgttcagccctg

SEQ ID NO: 57563 - DNA, 15 bp, Homo sapiens
tgcgttcagccctgc

SEQ ID NO: 57564 - DNA, 15 bp, Homo sapiens
gcgttcagccctgca

SEQ ID NO: 57565 - DNA, 15 bp, Homo sapiens
cgttcagccctgcag

SEQ ID NO: 57566 - DNA, 15 bp, Homo sapiens
gttcagccctgcaga

SEQ ID NO: 57567 - DNA, 15 bp, Homo sapiens
ttcagccctgcagat

SEQ ID NO: 57568 - DNA, 15 bp, Homo sapiens
tcagccctgcagatc

SEQ ID NO: 57569 - DNA, 15 bp, Homo sapiens
cagccctgcagatcc

SEQ ID NO: 57570 - DNA, 15 bp, Homo sapiens
agccctgcagatccg

SEQ ID NO: 57571 - DNA, 15 bp, Homo sapiens
gccctgcagatccgt

SEQ ID NO: 57572 - DNA, 15 bp, Homo sapiens
ccctgcagatccgta

SEQ ID NO: 57573 - DNA, 15 bp, Homo sapiens
cctgcagatccgtat

SEQ ID NO: 57574 - DNA, 15 bp, Homo sapiens
ctgcagatccgtatt

SEQ ID NO: 57575 - DNA, 15 bp, Homo sapiens
tgcagatccgtattt

SEQ ID NO: 57576 - DNA, 15 bp, Homo sapiens
gcagatccgtattta

SEQ ID NO: 57577 - DNA, 15 bp, Homo sapiens
cagatccgtatttaa

SEQ ID NO: 57578 - DNA, 15 bp, Homo sapiens
agatccgtatttaaa

SEQ ID NO: 57579 - DNA, 15 bp, Homo sapiens
gatccgtatttaaaa

SEQ ID NO: 57580 - DNA, 15 bp, Homo sapiens
atccgtatttaaaac

SEQ ID NO: 57581 - DNA, 15 bp, Homo sapiens
tccgtatttaaaaca

SEQ ID NO: 57582 - DNA, 15 bp, Homo sapiens
ccgtatttaaaacag

SEQ ID NO: 57583 - DNA, 15 bp, Homo sapiens
cgtatttaaaacagc

SEQ ID NO: 57584 - DNA, 15 bp, Homo sapiens
gtatttaaaacagca

SEQ ID NO: 57585 - DNA, 15 bp, Homo sapiens
tatttaaaacagcac

SEQ ID NO: 57586 - DNA, 15 bp, Homo sapiens
atttaaaacagcacc

SEQ ID NO: 57587 - DNA, 15 bp, Homo sapiens
tttaaaacagcacca

SEQ ID NO: 57588 - DNA, 15 bp, Homo sapiens
ttaaaacagcaccat

SEQ ID NO: 57589 - DNA, 15 bp, Homo sapiens
taaaacagcaccatc

SEQ ID NO: 57590 - DNA, 15 bp, Homo sapiens
aaaacagcaccatct

SEQ ID NO: 57591 - DNA, 15 bp, Homo sapiens
aaacagcaccatctg

SEQ ID NO: 57592 - DNA, 15 bp, Homo sapiens
aacagcaccatctgg

SEQ ID NO: 57593 - DNA, 15 bp, Homo sapiens
acagcaccatctggg

SEQ ID NO: 57594 - DNA, 15 bp, Homo sapiens
cagcaccatctggga

SEQ ID NO: 57595 - DNA, 15 bp, Homo sapiens
agcaccatctgggaa

SEQ ID NO: 57596 - DNA, 15 bp, Homo sapiens
gcaccatctgggaag

SEQ ID NO: 57597 - DNA, 15 bp, Homo sapiens
caccatctgggaagg

SEQ ID NO: 57598 - DNA, 15 bp, Homo sapiens
accatctgggaaggg

SEQ ID NO: 57599 - DNA, 15 bp, Homo sapiens
ccatctgggaagggt

SEQ ID NO: 57600 - DNA, 15 bp, Homo sapiens
catctgggaagggtg

SEQ ID NO: 57601 - DNA, 15 bp, Homo sapiens
atctgggaagggtgg

SEQ ID NO: 57602 - DNA, 15 bp, Homo sapiens
tctgggaagggtggg

SEQ ID NO: 57603 - DNA, 15 bp, Homo sapiens
ctgggaagggtgggt

SEQ ID NO: 57604 - DNA, 15 bp, Homo sapiens
tgggaagggtgggtg

SEQ ID NO: 57605 - DNA, 15 bp, Homo sapiens
gggaagggtgggtgg

SEQ ID NO: 57606 - DNA, 15 bp, Homo sapiens
ggaagggtgggtggc

SEQ ID NO: 57607 - DNA, 15 bp, Homo sapiens
gaagggtgggtggcg

SEQ ID NO: 57608 - DNA, 15 bp, Homo sapiens
aagggtgggtggcga

SEQ ID NO: 57609 - DNA, 15 bp, Homo sapiens
agggtgggtggcgat

SEQ ID NO: 57610 - DNA, 15 bp, Homo sapiens
gggtgggtggcgatg

SEQ ID NO: 57611 - DNA, 15 bp, Homo sapiens
ggtgggtggcgatgg

SEQ ID NO: 57612 - DNA, 15 bp, Homo sapiens
gtgggtggcgatggt

SEQ ID NO: 57613 - DNA, 15 bp, Homo sapiens
tgggtggcgatggtg

SEQ ID NO: 57614 - DNA, 15 bp, Homo sapiens
gggtggcgatggtga

SEQ ID NO: 57615 - DNA, 15 bp, Homo sapiens
ggtggcgatggtgat

SEQ ID NO: 57616 - DNA, 15 bp, Homo sapiens
gtggcgatggtgatg

SEQ ID NO: 57617 - DNA, 15 bp, Homo sapiens
tggcgatggtgatgc

SEQ ID NO: 57618 - DNA, 15 bp, Homo sapiens
ggcgatggtgatgcg

SEQ ID NO: 57619 - DNA, 15 bp, Homo sapiens
gcgatggtgatgcgg

SEQ ID NO: 57620 - DNA, 15 bp, Homo sapiens
cgatggtgatgcggg

SEQ ID NO: 57621 - DNA, 15 bp, Homo sapiens
gatggtgatgcgggc

SEQ ID NO: 57622 - DNA, 15 bp, Homo sapiens
atggtgatgcgggcg

SEQ ID NO: 57623 - DNA, 15 bp, Homo sapiens
tggtgatgcgggcgc

SEQ ID NO: 57624 - DNA, 15 bp, Homo sapiens
ggtgatgcgggcgcc

SEQ ID NO: 57625 - DNA, 15 bp, Homo sapiens
gtgatgcgggcgcct

SEQ ID NO: 57626 - DNA, 15 bp, Homo sapiens
tgatgcgggcgcctt

SEQ ID NO: 57627 - DNA, 15 bp, Homo sapiens
gatgcgggcgccttg

SEQ ID NO: 57628 - DNA, 15 bp, Homo sapiens
atgcgggcgccttgg

SEQ ID NO: 57629 - DNA, 15 bp, Homo sapiens
tgcgggcgccttgga

SEQ ID NO: 57630 - DNA, 15 bp, Homo sapiens
gcgggcgccttggag

SEQ ID NO: 57631 - DNA, 15 bp, Homo sapiens
cgggcgccttggagt

SEQ ID NO: 57632 - DNA, 15 bp, Homo sapiens
gggcgccttggagtt

SEQ ID NO: 57633 - DNA, 15 bp, Homo sapiens
ggcgccttggagttc

SEQ ID NO: 57634 - DNA, 15 bp, Homo sapiens
gcgccttggagttcc

SEQ ID NO: 57635 - DNA, 15 bp, Homo sapiens
cgccttggagttcct

SEQ ID NO: 57636 - DNA, 15 bp, Homo sapiens
gccttggagttcctt

SEQ ID NO: 57637 - DNA, 15 bp, Homo sapiens
ccttggagttccttt

SEQ ID NO: 57638 - DNA, 15 bp, Homo sapiens
cttggagttcctttg

SEQ ID NO: 57639 - DNA, 15 bp, Homo sapiens
ttggagttcctttgc

SEQ ID NO: 57640 - DNA, 15 bp, Homo sapiens
tggagttcctttgca

SEQ ID NO: 57641 - DNA, 15 bp, Homo sapiens
ggagttcctttgcag

SEQ ID NO: 57642 - DNA, 15 bp, Homo sapiens
gagttcctttgcagc

SEQ ID NO: 57643 - DNA, 15 bp, Homo sapiens
agttcctttgcagca

SEQ ID NO: 57644 - DNA, 15 bp, Homo sapiens
gttcctttgcagcac

SEQ ID NO: 57645 - DNA, 15 bp, Homo sapiens
ttcctttgcagcacg

SEQ ID NO: 57646 - DNA, 15 bp, Homo sapiens
tcctttgcagcacgc

SEQ ID NO: 57647 - DNA, 15 bp, Homo sapiens
cctttgcagcacgct

SEQ ID NO: 57648 - DNA, 15 bp, Homo sapiens
ctttgcagcacgctt

SEQ ID NO: 57649 - DNA, 15 bp, Homo sapiens
tttgcagcacgcttg

SEQ ID NO: 57650 - DNA, 15 bp, Homo sapiens
ttgcagcacgcttgg

SEQ ID NO: 57651 - DNA, 15 bp, Homo sapiens
tgcagcacgcttgga

SEQ ID NO: 57652 - DNA, 15 bp, Homo sapiens
gcagcacgcttggaa

SEQ ID NO: 57653 - DNA, 15 bp, Homo sapiens
cagcacgcttggaat

SEQ ID NO: 57654 - DNA, 15 bp, Homo sapiens
agcacgcttggaatt

SEQ ID NO: 57655 - DNA, 15 bp, Homo sapiens
gcacgcttggaattg

SEQ ID NO: 57656 - DNA, 15 bp, Homo sapiens
cacgcttggaattgc

SEQ ID NO: 57657 - DNA, 15 bp, Homo sapiens
acgcttggaattgca

SEQ ID NO: 57658 - DNA, 15 bp, Homo sapiens
cgcttggaattgcat

SEQ ID NO: 57659 - DNA, 15 bp, Homo sapiens
gcttggaattgcatc

SEQ ID NO: 57660 - DNA, 15 bp, Homo sapiens
cttggaattgcatca

SEQ ID NO: 57661 - DNA, 15 bp, Homo sapiens
ttggaattgcatcag

SEQ ID NO: 57662 - DNA, 15 bp, Homo sapiens
tggaattgcatcaga

SEQ ID NO: 57663 - DNA, 15 bp, Homo sapiens
ggaattgcatcagac

SEQ ID NO: 57664 - DNA, 15 bp, Homo sapiens
gaattgcatcagact

SEQ ID NO: 57665 - DNA, 15 bp, Homo sapiens
aattgcatcagactg

SEQ ID NO: 57666 - DNA, 15 bp, Homo sapiens
attgcatcagactga

SEQ ID NO: 57667 - DNA, 15 bp, Homo sapiens
ttgcatcagactgat

SEQ ID NO: 57668 - DNA, 15 bp, Homo sapiens
tgcatcagactgatc

SEQ ID NO: 57669 - DNA, 15 bp, Homo sapiens
gcatcagactgatca

SEQ ID NO: 57670 - DNA, 15 bp, Homo sapiens
catcagactgatcag

SEQ ID NO: 57671 - DNA, 15 bp, Homo sapiens
atcagactgatcaga

SEQ ID NO: 57672 - DNA, 15 bp, Homo sapiens
tcagactgatcagaa

SEQ ID NO: 57673 - DNA, 15 bp, Homo sapiens
cagactgatcagaaa

SEQ ID NO: 57674 - DNA, 15 bp, Homo sapiens
agactgatcagaaat

SEQ ID NO: 57675 - DNA, 15 bp, Homo sapiens
gactgatcagaaatc

SEQ ID NO: 57676 - DNA, 15 bp, Homo sapiens
actgatcagaaatcc

SEQ ID NO: 57677 - DNA, 15 bp, Homo sapiens
ctgatcagaaatccc

SEQ ID NO: 57678 - DNA, 15 bp, Homo sapiens
tgatcagaaatcccc

SEQ ID NO: 57679 - DNA, 15 bp, Homo sapiens
gatcagaaatccccc

SEQ ID NO: 57680 - DNA, 15 bp, Homo sapiens
atcagaaatcccccc

SEQ ID NO: 57681 - DNA, 15 bp, Homo sapiens
tcagaaatccccccg

SEQ ID NO: 57682 - DNA, 15 bp, Homo sapiens
cagaaatccccccgc

SEQ ID NO: 57683 - DNA, 15 bp, Homo sapiens
agaaatccccccgcc

SEQ ID NO: 57684 - DNA, 15 bp, Homo sapiens
gaaatccccccgccc

SEQ ID NO: 57685 - DNA, 15 bp, Homo sapiens
aaatccccccgcccc

SEQ ID NO: 57686 - DNA, 15 bp, Homo sapiens
aatccccccgccccc

SEQ ID NO: 57687 - DNA, 15 bp, Homo sapiens
atccccccgccccca

SEQ ID NO: 57688 - DNA, 15 bp, Homo sapiens
tccccccgcccccaa

SEQ ID NO: 57689 - DNA, 15 bp, Homo sapiens
ccccccgcccccaag

SEQ ID NO: 57690 - DNA, 15 bp, Homo sapiens
cccccgcccccaagc

SEQ ID NO: 57691 - DNA, 15 bp, Homo sapiens
ccccgcccccaagct

SEQ ID NO: 57692 - DNA, 15 bp, Homo sapiens
cccgcccccaagctc

SEQ ID NO: 57693 - DNA, 15 bp, Homo sapiens
ccgcccccaagctca

SEQ ID NO: 57694 - DNA, 15 bp, Homo sapiens
cgcccccaagctcag

SEQ ID NO: 57695 - DNA, 15 bp, Homo sapiens
gcccccaagctcagc

SEQ ID NO: 57696 - DNA, 15 bp, Homo sapiens
cccccaagctcagcc

SEQ ID NO: 57697 - DNA, 15 bp, Homo sapiens
ccccaagctcagccc

SEQ ID NO: 57698 - DNA, 15 bp, Homo sapiens
cccaagctcagcccc

SEQ ID NO: 57699 - DNA, 15 bp, Homo sapiens
ccaagctcagcccct

SEQ ID NO: 57700 - DNA, 15 bp, Homo sapiens
caagctcagcccctc

SEQ ID NO: 57701 - DNA, 15 bp, Homo sapiens
aagctcagcccctcc

SEQ ID NO: 57702 - DNA, 15 bp, Homo sapiens
agctcagcccctccc

SEQ ID NO: 57703 - DNA, 15 bp, Homo sapiens
gctcagcccctcccg

SEQ ID NO: 57704 - DNA, 15 bp, Homo sapiens
ctcagcccctcccgc

SEQ ID NO: 57705 - DNA, 15 bp, Homo sapiens
tcagcccctcccgcc

SEQ ID NO: 57706 - DNA, 15 bp, Homo sapiens
cagcccctcccgcca

SEQ ID NO: 57707 - DNA, 15 bp, Homo sapiens
agcccctcccgccac

SEQ ID NO: 57708 - DNA, 15 bp, Homo sapiens
gcccctcccgccacg

SEQ ID NO: 57709 - DNA, 15 bp, Homo sapiens
cccctcccgccacgc

SEQ ID NO: 57710 - DNA, 15 bp, Homo sapiens
ccctcccgccacgct

SEQ ID NO: 57711 - DNA, 15 bp, Homo sapiens
cctcccgccacgctc

SEQ ID NO: 57712 - DNA, 15 bp, Homo sapiens
ctcccgccacgctcc

SEQ ID NO: 57713 - DNA, 15 bp, Homo sapiens
tcccgccacgctccc

SEQ ID NO: 57714 - DNA, 15 bp, Homo sapiens
cccgccacgctcccc

SEQ ID NO: 57715 - DNA, 15 bp, Homo sapiens
ccgccacgctcccct

SEQ ID NO: 57716 - DNA, 15 bp, Homo sapiens
cgccacgctcccctg

SEQ ID NO: 57717 - DNA, 15 bp, Homo sapiens
gccacgctcccctgc

SEQ ID NO: 57718 - DNA, 15 bp, Homo sapiens
ccacgctcccctgcc

SEQ ID NO: 57719 - DNA, 15 bp, Homo sapiens
cacgctcccctgccc

SEQ ID NO: 57720 - DNA, 15 bp, Homo sapiens
acgctcccctgcccg

SEQ ID NO: 57721 - DNA, 15 bp, Homo sapiens
cgctcccctgcccgc

SEQ ID NO: 57722 - DNA, 15 bp, Homo sapiens
gctcccctgcccgcc

SEQ ID NO: 57723 - DNA, 15 bp, Homo sapiens
ctcccctgcccgccc

SEQ ID NO: 57724 - DNA, 15 bp, Homo sapiens
tcccctgcccgcccc

SEQ ID NO: 57725 - DNA, 15 bp, Homo sapiens
cccctgcccgcccct

SEQ ID NO: 57726 - DNA, 15 bp, Homo sapiens
ccctgcccgcccctc

SEQ ID NO: 57727 - DNA, 15 bp, Homo sapiens
cctgcccgcccctcc

SEQ ID NO: 57728 - DNA, 15 bp, Homo sapiens
ctgcccgcccctccc

SEQ ID NO: 57729 - DNA, 15 bp, Homo sapiens
tgcccgcccctcccc

SEQ ID NO: 57730 - DNA, 15 bp, Homo sapiens
gcccgcccctcccct

SEQ ID NO: 57731 - DNA, 15 bp, Homo sapiens
cccgcccctcccctc

SEQ ID NO: 57732 - DNA, 15 bp, Homo sapiens
ccgcccctcccctcc

SEQ ID NO: 57733 - DNA, 15 bp, Homo sapiens
cgcccctcccctccc

SEQ ID NO: 57734 - DNA, 15 bp, Homo sapiens
gcccctcccctcccc

SEQ ID NO: 57735 - DNA, 15 bp, Homo sapiens
cccctcccctcccct

SEQ ID NO: 57736 - DNA, 15 bp, Homo sapiens
ccctcccctcccctc

SEQ ID NO: 57737 - DNA, 15 bp, Homo sapiens
cctcccctcccctcc

SEQ ID NO: 57738 - DNA, 15 bp, Homo sapiens
ctcccctcccctccc

SEQ ID NO: 57739 - DNA, 15 bp, Homo sapiens
tcccctcccctccct

SEQ ID NO: 57740 - DNA, 15 bp, Homo sapiens
cccctcccctccctt

SEQ ID NO: 57741 - DNA, 15 bp, Homo sapiens
ccctcccctcccttc

SEQ ID NO: 57742 - DNA, 15 bp, Homo sapiens
cctcccctcccttcg

SEQ ID NO: 57743 - DNA, 15 bp, Homo sapiens
ctcccctcccttcgc

SEQ ID NO: 57744 - DNA, 15 bp, Homo sapiens
tcccctcccttcgcg

SEQ ID NO: 57745 - DNA, 15 bp, Homo sapiens
cccctcccttcgcgt

SEQ ID NO: 57746 - DNA, 15 bp, Homo sapiens
ccctcccttcgcgta

SEQ ID NO: 57747 - DNA, 15 bp, Homo sapiens
cctcccttcgcgtag

SEQ ID NO: 57748 - DNA, 15 bp, Homo sapiens
ctcccttcgcgtaga

SEQ ID NO: 57749 - DNA, 15 bp, Homo sapiens
tcccttcgcgtagat

SEQ ID NO: 57750 - DNA, 15 bp, Homo sapiens
cccttcgcgtagatc

SEQ ID NO: 57751 - DNA, 15 bp, Homo sapiens
ccttcgcgtagatct

SEQ ID NO: 57752 - DNA, 15 bp, Homo sapiens
cttcgcgtagatctg

SEQ ID NO: 57753 - DNA, 15 bp, Homo sapiens
ttcgcgtagatctga

SEQ ID NO: 57754 - DNA, 15 bp, Homo sapiens
tcgcgtagatctgac

SEQ ID NO: 57755 - DNA, 15 bp, Homo sapiens
cgcgtagatctgact

SEQ ID NO: 57756 - DNA, 15 bp, Homo sapiens
gcgtagatctgactg

SEQ ID NO: 57757 - DNA, 15 bp, Homo sapiens
cgtagatctgactga

SEQ ID NO: 57758 - DNA, 15 bp, Homo sapiens
gtagatctgactgag

SEQ ID NO: 57759 - DNA, 15 bp, Homo sapiens
tagatctgactgaga

SEQ ID NO: 57760 - DNA, 15 bp, Homo sapiens
agatctgactgagaa

SEQ ID NO: 57761 - DNA, 15 bp, Homo sapiens
gatctgactgagaaa

SEQ ID NO: 57762 - DNA, 15 bp, Homo sapiens
atctgactgagaaaa

SEQ ID NO: 57763 - DNA, 15 bp, Homo sapiens
tctgactgagaaaac

SEQ ID NO: 57764 - DNA, 15 bp, Homo sapiens
ctgactgagaaaacg

SEQ ID NO: 57765 - DNA, 15 bp, Homo sapiens
tgactgagaaaacga

SEQ ID NO: 57766 - DNA, 15 bp, Homo sapiens
gactgagaaaacgac

SEQ ID NO: 57767 - DNA, 15 bp, Homo sapiens
actgagaaaacgact

SEQ ID NO: 57768 - DNA, 15 bp, Homo sapiens
ctgagaaaacgactg

SEQ ID NO: 57769 - DNA, 15 bp, Homo sapiens
tgagaaaacgactgg

SEQ ID NO: 57770 - DNA, 15 bp, Homo sapiens
gagaaaacgactgga

SEQ ID NO: 57771 - DNA, 15 bp, Homo sapiens
agaaaacgactggat

SEQ ID NO: 57772 - DNA, 15 bp, Homo sapiens
gaaaacgactggatc

SEQ ID NO: 57773 - DNA, 15 bp, Homo sapiens
aaaacgactggatct

SEQ ID NO: 57774 - DNA, 15 bp, Homo sapiens
aaacgactggatctc

SEQ ID NO: 57775 - DNA, 15 bp, Homo sapiens
aacgactggatctcg

SEQ ID NO: 57776 - DNA, 15 bp, Homo sapiens
acgactggatctcgg

SEQ ID NO: 57777 - DNA, 15 bp, Homo sapiens
cgactggatctcgga

SEQ ID NO: 57778 - DNA, 15 bp, Homo sapiens
gactggatctcggaa

SEQ ID NO: 57779 - DNA, 15 bp, Homo sapiens
actggatctcggaac

SEQ ID NO: 57780 - DNA, 15 bp, Homo sapiens
ctggatctcggaaca

SEQ ID NO: 57781 - DNA, 15 bp, Homo sapiens
tggatctcggaacaa

SEQ ID NO: 57782 - DNA, 15 bp, Homo sapiens
ggatctcggaacaat

SEQ ID NO: 57783 - DNA, 15 bp, Homo sapiens
gatctcggaacaatc

SEQ ID NO: 57784 - DNA, 15 bp, Homo sapiens
atctcggaacaatct

SEQ ID NO: 57785 - DNA, 15 bp, Homo sapiens
tctcggaacaatctg

SEQ ID NO: 57786 - DNA, 15 bp, Homo sapiens
ctcggaacaatctgt

SEQ ID NO: 57787 - DNA, 15 bp, Homo sapiens
tcggaacaatctgtg

SEQ ID NO: 57788 - DNA, 15 bp, Homo sapiens
cggaacaatctgtgc

SEQ ID NO: 57789 - DNA, 15 bp, Homo sapiens
ggaacaatctgtgcc

SEQ ID NO: 57790 - DNA, 15 bp, Homo sapiens
gaacaatctgtgccc

SEQ ID NO: 57791 - DNA, 15 bp, Homo sapiens
aacaatctgtgcccc

SEQ ID NO: 57792 - DNA, 15 bp, Homo sapiens
acaatctgtgcccca

SEQ ID NO: 57793 - DNA, 15 bp, Homo sapiens
caatctgtgccccat

SEQ ID NO: 57794 - DNA, 15 bp, Homo sapiens
aatctgtgccccatt

SEQ ID NO: 57795 - DNA, 15 bp, Homo sapiens
atctgtgccccattc

SEQ ID NO: 57796 - DNA, 15 bp, Homo sapiens
tctgtgccccattcg

SEQ ID NO: 57797 - DNA, 15 bp, Homo sapiens
ctgtgccccattcgc

SEQ ID NO: 57798 - DNA, 15 bp, Homo sapiens
tgtgccccattcgct

SEQ ID NO: 57799 - DNA, 15 bp, Homo sapiens
gtgccccattcgctg

SEQ ID NO: 57800 - DNA, 15 bp, Homo sapiens
tgccccattcgctgc

SEQ ID NO: 57801 - DNA, 15 bp, Homo sapiens
gccccattcgctgca

SEQ ID NO: 57802 - DNA, 15 bp, Homo sapiens
ccccattcgctgcag

SEQ ID NO: 57803 - DNA, 15 bp, Homo sapiens
cccattcgctgcagg

SEQ ID NO: 57804 - DNA, 15 bp, Homo sapiens
ccattcgctgcaggc

SEQ ID NO: 57805 - DNA, 15 bp, Homo sapiens
cattcgctgcaggct

SEQ ID NO: 57806 - DNA, 15 bp, Homo sapiens
attcgctgcaggctt

SEQ ID NO: 57807 - DNA, 15 bp, Homo sapiens
ttcgctgcaggcttg

SEQ ID NO: 57808 - DNA, 15 bp, Homo sapiens
tcgctgcaggcttgc

SEQ ID NO: 57809 - DNA, 15 bp, Homo sapiens
cgctgcaggcttgct

SEQ ID NO: 57810 - DNA, 15 bp, Homo sapiens
gctgcaggcttgctc

SEQ ID NO: 57811 - DNA, 15 bp, Homo sapiens
ctgcaggcttgctcc

SEQ ID NO: 57812 - DNA, 15 bp, Homo sapiens
tgcaggcttgctccg

SEQ ID NO: 57813 - DNA, 15 bp, Homo sapiens
gcaggcttgctccgt

SEQ ID NO: 57814 - DNA, 15 bp, Homo sapiens
caggcttgctccgta

SEQ ID NO: 57815 - DNA, 15 bp, Homo sapiens
aggcttgctccgtaa

SEQ ID NO: 57816 - DNA, 15 bp, Homo sapiens
ggcttgctccgtaaa

SEQ ID NO: 57817 - DNA, 15 bp, Homo sapiens
gcttgctccgtaaac

SEQ ID NO: 57818 - DNA, 15 bp, Homo sapiens
cttgctccgtaaacc

SEQ ID NO: 57819 - DNA, 15 bp, Homo sapiens
ttgctccgtaaaccc

SEQ ID NO: 57820 - DNA, 15 bp, Homo sapiens
tgctccgtaaaccct

SEQ ID NO: 57821 - DNA, 15 bp, Homo sapiens
gctccgtaaaccctg

SEQ ID NO: 57822 - DNA, 15 bp, Homo sapiens
ctccgtaaaccctgc

SEQ ID NO: 57823 - DNA, 15 bp, Homo sapiens
tccgtaaaccctgcc

SEQ ID NO: 57824 - DNA, 15 bp, Homo sapiens
ccgtaaaccctgccc

SEQ ID NO: 57825 - DNA, 15 bp, Homo sapiens
cgtaaaccctgccct

SEQ ID NO: 57826 - DNA, 15 bp, Homo sapiens
gtaaaccctgcccta

SEQ ID NO: 57827 - DNA, 15 bp, Homo sapiens
taaaccctgccctac

SEQ ID NO: 57828 - DNA, 15 bp, Homo sapiens
aaaccctgccctacg

SEQ ID NO: 57829 - DNA, 15 bp, Homo sapiens
aaccctgccctacgc

SEQ ID NO: 57830 - DNA, 15 bp, Homo sapiens
accctgccctacgct

SEQ ID NO: 57831 - DNA, 15 bp, Homo sapiens
ccctgccctacgctc

SEQ ID NO: 57832 - DNA, 15 bp, Homo sapiens
cctgccctacgctcc

SEQ ID NO: 57833 - DNA, 15 bp, Homo sapiens
ctgccctacgctccc

SEQ ID NO: 57834 - DNA, 15 bp, Homo sapiens
tgccctacgctccct

SEQ ID NO: 57835 - DNA, 15 bp, Homo sapiens
gccctacgctccctt

SEQ ID NO: 57836 - DNA, 15 bp, Homo sapiens
ccctacgctcccttt

SEQ ID NO: 57837 - DNA, 15 bp, Homo sapiens
cctacgctccctttg

SEQ ID NO: 57838 - DNA, 15 bp, Homo sapiens
ctacgctccctttgt

SEQ ID NO: 57839 - DNA, 15 bp, Homo sapiens
tacgctccctttgtg

SEQ ID NO: 57840 - DNA, 15 bp, Homo sapiens
acgctccctttgtgt

SEQ ID NO: 57841 - DNA, 15 bp, Homo sapiens
cgctccctttgtgtg

SEQ ID NO: 57842 - DNA, 15 bp, Homo sapiens
gctccctttgtgtgc

SEQ ID NO: 57843 - DNA, 15 bp, Homo sapiens
ctccctttgtgtgcc

SEQ ID NO: 57844 - DNA, 15 bp, Homo sapiens
tccctttgtgtgccg

SEQ ID NO: 57845 - DNA, 15 bp, Homo sapiens
ccctttgtgtgccga

SEQ ID NO: 57846 - DNA, 15 bp, Homo sapiens
cctttgtgtgccgag

SEQ ID NO: 57847 - DNA, 15 bp, Homo sapiens
ctttgtgtgccgagc

SEQ ID NO: 57848 - DNA, 15 bp, Homo sapiens
tttgtgtgccgagca

SEQ ID NO: 57849 - DNA, 15 bp, Homo sapiens
ttgtgtgccgagcag

SEQ ID NO: 57850 - DNA, 15 bp, Homo sapiens
tgtgtgccgagcagc

SEQ ID NO: 57851 - DNA, 15 bp, Homo sapiens
gtgtgccgagcagcc

SEQ ID NO: 57852 - DNA, 15 bp, Homo sapiens
tgtgccgagcagcct

SEQ ID NO: 57853 - DNA, 15 bp, Homo sapiens
gtgccgagcagccta

SEQ ID NO: 57854 - DNA, 15 bp, Homo sapiens
tgccgagcagcctat

SEQ ID NO: 57855 - DNA, 15 bp, Homo sapiens
gccgagcagcctatc

SEQ ID NO: 57856 - DNA, 15 bp, Homo sapiens
ccgagcagcctatca

SEQ ID NO: 57857 - DNA, 15 bp, Homo sapiens
cgagcagcctatcac

SEQ ID NO: 57858 - DNA, 15 bp, Homo sapiens
gagcagcctatcacc

SEQ ID NO: 57859 - DNA, 15 bp, Homo sapiens
agcagcctatcaccg

SEQ ID NO: 57860 - DNA, 15 bp, Homo sapiens
gcagcctatcaccgt

SEQ ID NO: 57861 - DNA, 15 bp, Homo sapiens
cagcctatcaccgtc

SEQ ID NO: 57862 - DNA, 15 bp, Homo sapiens
agcctatcaccgtca

SEQ ID NO: 57863 - DNA, 15 bp, Homo sapiens
gcctatcaccgtcat

SEQ ID NO: 57864 - DNA, 15 bp, Homo sapiens
cctatcaccgtcatc

SEQ ID NO: 57865 - DNA, 15 bp, Homo sapiens
ctatcaccgtcatct

SEQ ID NO: 57866 - DNA, 15 bp, Homo sapiens
tatcaccgtcatctg

SEQ ID NO: 57867 - DNA, 15 bp, Homo sapiens
atcaccgtcatctga

SEQ ID NO: 57868 - DNA, 15 bp, Homo sapiens
tcaccgtcatctgat

SEQ ID NO: 57869 - DNA, 15 bp, Homo sapiens
caccgtcatctgatc

SEQ ID NO: 57870 - DNA, 15 bp, Homo sapiens
accgtcatctgatcc

SEQ ID NO: 57871 - DNA, 15 bp, Homo sapiens
ccgtcatctgatcct

SEQ ID NO: 57872 - DNA, 15 bp, Homo sapiens
cgtcatctgatccta

SEQ ID NO: 57873 - DNA, 15 bp, Homo sapiens
gtcatctgatcctag

SEQ ID NO: 57874 - DNA, 15 bp, Homo sapiens
tcatctgatcctagc

SEQ ID NO: 57875 - DNA, 15 bp, Homo sapiens
catctgatcctagcg

SEQ ID NO: 57876 - DNA, 15 bp, Homo sapiens
atctgatcctagcgc

SEQ ID NO: 57877 - DNA, 15 bp, Homo sapiens
tctgatcctagcgcc

SEQ ID NO: 57878 - DNA, 15 bp, Homo sapiens
ctgatcctagcgcct

SEQ ID NO: 57879 - DNA, 15 bp, Homo sapiens
tgatcctagcgcctg

SEQ ID NO: 57880 - DNA, 15 bp, Homo sapiens
gatcctagcgcctgt

SEQ ID NO: 57881 - DNA, 15 bp, Homo sapiens
atcctagcgcctgtt

SEQ ID NO: 57882 - DNA, 15 bp, Homo sapiens
tcctagcgcctgttt

SEQ ID NO: 57883 - DNA, 15 bp, Homo sapiens
cctagcgcctgtttt

SEQ ID NO: 57884 - DNA, 15 bp, Homo sapiens
ctagcgcctgttttt

SEQ ID NO: 57885 - DNA, 15 bp, Homo sapiens
tagcgcctgtttttt

SEQ ID NO: 57886 - DNA, 15 bp, Homo sapiens
agcgcctgtttttta

SEQ ID NO: 57887 - DNA, 15 bp, Homo sapiens
gcgcctgttttttat

SEQ ID NO: 57888 - DNA, 15 bp, Homo sapiens
cgcctgttttttatc

SEQ ID NO: 57889 - DNA, 15 bp, Homo sapiens
gcctgttttttatct

SEQ ID NO: 57890 - DNA, 15 bp, Homo sapiens
cctgttttttatctt

SEQ ID NO: 57891 - DNA, 15 bp, Homo sapiens
ctgttttttatcttt

SEQ ID NO: 57892 - DNA, 15 bp, Homo sapiens
tgttttttatctttt

SEQ ID NO: 57893 - DNA, 15 bp, Homo sapiens
gttttttatcttttc

SEQ ID NO: 57894 - DNA, 15 bp, Homo sapiens
ttttttatcttttcc

SEQ ID NO: 57895 - DNA, 15 bp, Homo sapiens
tttttatcttttcct

SEQ ID NO: 57896 - DNA, 15 bp, Homo sapiens
ttttatcttttcctt

SEQ ID NO: 57897 - DNA, 15 bp, Homo sapiens
tttatcttttccttc

SEQ ID NO: 57898 - DNA, 15 bp, Homo sapiens
ttatcttttccttct

SEQ ID NO: 57899 - DNA, 15 bp, Homo sapiens
tatcttttccttctg

SEQ ID NO: 57900 - DNA, 15 bp, Homo sapiens
atcttttccttctga

SEQ ID NO: 57901 - DNA, 15 bp, Homo sapiens
tcttttccttctgaa

SEQ ID NO: 57902 - DNA, 15 bp, Homo sapiens
cttttccttctgaat

SEQ ID NO: 57903 - DNA, 15 bp, Homo sapiens
ttttccttctgaatt

SEQ ID NO: 57904 - DNA, 15 bp, Homo sapiens
tttccttctgaattt

SEQ ID NO: 57905 - DNA, 15 bp, Homo sapiens
ttccttctgaatttc

SEQ ID NO: 57906 - DNA, 15 bp, Homo sapiens
tccttctgaatttcc

SEQ ID NO: 57907 - DNA, 15 bp, Homo sapiens
ccttctgaatttcca

SEQ ID NO: 57908 - DNA, 15 bp, Homo sapiens
cttctgaatttccac

SEQ ID NO: 57909 - DNA, 15 bp, Homo sapiens
ttctgaatttccaca

SEQ ID NO: 57910 - DNA, 15 bp, Homo sapiens
tctgaatttccacaa

SEQ ID NO: 57911 - DNA, 15 bp, Homo sapiens
ctgaatttccacaat

SEQ ID NO: 57912 - DNA, 15 bp, Homo sapiens
tgaatttccacaata

SEQ ID NO: 57913 - DNA, 15 bp, Homo sapiens
gaatttccacaatat

SEQ ID NO: 57914 - DNA, 15 bp, Homo sapiens
aatttccacaatatc

SEQ ID NO: 57915 - DNA, 15 bp, Homo sapiens
atttccacaatatcc

SEQ ID NO: 57916 - DNA, 15 bp, Homo sapiens
tttccacaatatcct

SEQ ID NO: 57917 - DNA, 15 bp, Homo sapiens
ttccacaatatcctc

SEQ ID NO: 57918 - DNA, 15 bp, Homo sapiens
tccacaatatcctcg

SEQ ID NO: 57919 - DNA, 15 bp, Homo sapiens
ccacaatatcctcgc

SEQ ID NO: 57920 - DNA, 15 bp, Homo sapiens
cacaatatcctcgct

SEQ ID NO: 57921 - DNA, 15 bp, Homo sapiens
acaatatcctcgctt

SEQ ID NO: 57922 - DNA, 15 bp, Homo sapiens
caatatcctcgcttc

SEQ ID NO: 57923 - DNA, 15 bp, Homo sapiens
aatatcctcgcttcg

SEQ ID NO: 57924 - DNA, 15 bp, Homo sapiens
atatcctcgcttcgc

SEQ ID NO: 57925 - DNA, 15 bp, Homo sapiens
tatcctcgcttcgcc

SEQ ID NO: 57926 - DNA, 15 bp, Homo sapiens
atcctcgcttcgcct

SEQ ID NO: 57927 - DNA, 15 bp, Homo sapiens
tcctcgcttcgccta

SEQ ID NO: 57928 - DNA, 15 bp, Homo sapiens
cctcgcttcgcctat

SEQ ID NO: 57929 - DNA, 15 bp, Homo sapiens
ctcgcttcgcctatg

SEQ ID NO: 57930 - DNA, 15 bp, Homo sapiens
tcgcttcgcctatga

SEQ ID NO: 57931 - DNA, 15 bp, Homo sapiens
cgcttcgcctatgaa

SEQ ID NO: 57932 - DNA, 15 bp, Homo sapiens
gcttcgcctatgaat

SEQ ID NO: 57933 - DNA, 15 bp, Homo sapiens
cttcgcctatgaatc

SEQ ID NO: 57934 - DNA, 15 bp, Homo sapiens
ttcgcctatgaatcc

SEQ ID NO: 57935 - DNA, 15 bp, Homo sapiens
tcgcctatgaatcca

SEQ ID NO: 57936 - DNA, 15 bp, Homo sapiens
cgcctatgaatccac

SEQ ID NO: 57937 - DNA, 15 bp, Homo sapiens
gcctatgaatccacc

SEQ ID NO: 57938 - DNA, 15 bp, Homo sapiens
cctatgaatccacct

SEQ ID NO: 57939 - DNA, 15 bp, Homo sapiens
ctatgaatccacctg

SEQ ID NO: 57940 - DNA, 15 bp, Homo sapiens
tatgaatccacctgc

SEQ ID NO: 57941 - DNA, 15 bp, Homo sapiens
atgaatccacctgcg

SEQ ID NO: 57942 - DNA, 15 bp, Homo sapiens
tgaatccacctgcgc

SEQ ID NO: 57943 - DNA, 15 bp, Homo sapiens
gaatccacctgcgca

SEQ ID NO: 57944 - DNA, 15 bp, Homo sapiens
aatccacctgcgcag

SEQ ID NO: 57945 - DNA, 15 bp, Homo sapiens
atccacctgcgcaga

SEQ ID NO: 57946 - DNA, 15 bp, Homo sapiens
tccacctgcgcagag

SEQ ID NO: 57947 - DNA, 15 bp, Homo sapiens
ccacctgcgcagagt

SEQ ID NO: 57948 - DNA, 15 bp, Homo sapiens
cacctgcgcagagtt

SEQ ID NO: 57949 - DNA, 15 bp, Homo sapiens
acctgcgcagagttg

SEQ ID NO: 57950 - DNA, 15 bp, Homo sapiens
cctgcgcagagttgg

SEQ ID NO: 57951 - DNA, 15 bp, Homo sapiens
ctgcgcagagttggg

SEQ ID NO: 57952 - DNA, 15 bp, Homo sapiens
tgcgcagagttggga

SEQ ID NO: 57953 - DNA, 15 bp, Homo sapiens
gcgcagagttgggat

SEQ ID NO: 57954 - DNA, 15 bp, Homo sapiens
cgcagagttgggatt

SEQ ID NO: 57955 - DNA, 15 bp, Homo sapiens
cagagttgggattct

SEQ ID NO: 57956 - DNA, 15 bp, Homo sapiens
agagttgggattctt

SEQ ID NO: 57957 - DNA, 15 bp, Homo sapiens
gagttgggattcttt

SEQ ID NO: 57958 - DNA, 15 bp, Homo sapiens
agttgggattctttc

SEQ ID NO: 57959 - DNA, 15 bp, Homo sapiens
gttgggattctttct

SEQ ID NO: 57960 - DNA, 15 bp, Homo sapiens
ttgggattctttctt

SEQ ID NO: 57961 - DNA, 15 bp, Homo sapiens
tgggattctttcttt

SEQ ID NO: 57962 - DNA, 15 bp, Homo sapiens
gggattctttctttc

SEQ ID NO: 57963 - DNA, 15 bp, Homo sapiens
ggattctttctttcg

SEQ ID NO: 57964 - DNA, 15 bp, Homo sapiens
gattctttctttcgt

SEQ ID NO: 57965 - DNA, 15 bp, Homo sapiens
attctttctttcgtt

SEQ ID NO: 57966 - DNA, 15 bp, Homo sapiens
ttctttctttcgttc

SEQ ID NO: 57967 - DNA, 15 bp, Homo sapiens
tctttctttcgttcg

SEQ ID NO: 57968 - DNA, 15 bp, Homo sapiens
ctttctttcgttcgt

SEQ ID NO: 57969 - DNA, 15 bp, Homo sapiens
tttctttcgttcgtt

SEQ ID NO: 57970 - DNA, 15 bp, Homo sapiens
ttctttcgttcgtta

SEQ ID NO: 57971 - DNA, 15 bp, Homo sapiens
tctttcgttcgttaa

SEQ ID NO: 57972 - DNA, 15 bp, Homo sapiens
ctttcgttcgttaaa

SEQ ID NO: 57973 - DNA, 15 bp, Homo sapiens
tttcgttcgttaaaa

SEQ ID NO: 57974 - DNA, 15 bp, Homo sapiens
ttcgttcgttaaaac

SEQ ID NO: 57975 - DNA, 15 bp, Homo sapiens
tcgttcgttaaaaca

SEQ ID NO: 57976 - DNA, 15 bp, Homo sapiens
cgttcgttaaaacag

SEQ ID NO: 57977 - DNA, 15 bp, Homo sapiens
gttcgttaaaacagt

SEQ ID NO: 57978 - DNA, 15 bp, Homo sapiens
ttcgttaaaacagtg

SEQ ID NO: 57979 - DNA, 15 bp, Homo sapiens
tcgttaaaacagtgg

SEQ ID NO: 57980 - DNA, 15 bp, Homo sapiens
cgttaaaacagtggt

SEQ ID NO: 57981 - DNA, 15 bp, Homo sapiens
gttaaaacagtggtc

SEQ ID NO: 57982 - DNA, 15 bp, Homo sapiens
ttaaaacagtggtct

SEQ ID NO: 57983 - DNA, 15 bp, Homo sapiens
taaaacagtggtctt

SEQ ID NO: 57984 - DNA, 15 bp, Homo sapiens
aaaacagtggtcttg

SEQ ID NO: 57985 - DNA, 15 bp, Homo sapiens
aaacagtggtcttga

SEQ ID NO: 57986 - DNA, 15 bp, Homo sapiens
aacagtggtcttgag

SEQ ID NO: 57987 - DNA, 15 bp, Homo sapiens
acagtggtcttgagt

SEQ ID NO: 57988 - DNA, 15 bp, Homo sapiens
cagtggtcttgagtt

SEQ ID NO: 57989 - DNA, 15 bp, Homo sapiens
agtggtcttgagttt

SEQ ID NO: 57990 - DNA, 15 bp, Homo sapiens
gtggtcttgagtttc

SEQ ID NO: 57991 - DNA, 15 bp, Homo sapiens
tggtcttgagtttcg

SEQ ID NO: 57992 - DNA, 15 bp, Homo sapiens
ggtcttgagtttcgg

SEQ ID NO: 57993 - DNA, 15 bp, Homo sapiens
gtcttgagtttcgga

SEQ ID NO: 57994 - DNA, 15 bp, Homo sapiens
tcttgagtttcggaa

SEQ ID NO: 57995 - DNA, 15 bp, Homo sapiens
cttgagtttcggaaa

SEQ ID NO: 57996 - DNA, 15 bp, Homo sapiens
ttgagtttcggaaac

SEQ ID NO: 57997 - DNA, 15 bp, Homo sapiens
tgagtttcggaaaca

SEQ ID NO: 57998 - DNA, 15 bp, Homo sapiens
gagtttcggaaacag

SEQ ID NO: 57999 - DNA, 15 bp, Homo sapiens
agtttcggaaacaga

SEQ ID NO: 58000 - DNA, 15 bp, Homo sapiens
gtttcggaaacagat

SEQ ID NO: 58001 - DNA, 15 bp, Homo sapiens
tttcggaaacagatt

SEQ ID NO: 58002 - DNA, 15 bp, Homo sapiens
ttcggaaacagattt

SEQ ID NO: 58003 - DNA, 15 bp, Homo sapiens
tcggaaacagatttt

SEQ ID NO: 58004 - DNA, 15 bp, Homo sapiens
cggaaacagattttt

SEQ ID NO: 58005 - DNA, 15 bp, Homo sapiens
ggaaacagatttttc

SEQ ID NO: 58006 - DNA, 15 bp, Homo sapiens
gaaacagatttttcc

SEQ ID NO: 58007 - DNA, 15 bp, Homo sapiens
aaacagatttttcct

SEQ ID NO: 58008 - DNA, 15 bp, Homo sapiens
aacagatttttccta

SEQ ID NO: 58009 - DNA, 15 bp, Homo sapiens
acagatttttcctac

SEQ ID NO: 58010 - DNA, 15 bp, Homo sapiens
cagatttttcctacg

SEQ ID NO: 58011 - DNA, 15 bp, Homo sapiens
agatttttcctacgt

SEQ ID NO: 58012 - DNA, 15 bp, Homo sapiens
gatttttcctacgtt

SEQ ID NO: 58013 - DNA, 15 bp, Homo sapiens
atttttcctacgttc

SEQ ID NO: 58014 - DNA, 15 bp, Homo sapiens
tttttcctacgttcc

SEQ ID NO: 58015 - DNA, 15 bp, Homo sapiens
ttttcctacgttccc

SEQ ID NO: 58016 - DNA, 15 bp, Homo sapiens
tttcctacgttcccc

SEQ ID NO: 58017 - DNA, 15 bp, Homo sapiens
ttcctacgttcccct

SEQ ID NO: 58018 - DNA, 15 bp, Homo sapiens
tcctacgttcccctc

SEQ ID NO: 58019 - DNA, 15 bp, Homo sapiens
cctacgttcccctca

SEQ ID NO: 58020 - DNA, 15 bp, Homo sapiens
ctacgttcccctcac

SEQ ID NO: 58021 - DNA, 15 bp, Homo sapiens
tacgttcccctcacc

SEQ ID NO: 58022 - DNA, 15 bp, Homo sapiens
acgttcccctcaccc

SEQ ID NO: 58023 - DNA, 15 bp, Homo sapiens
cgttcccctcacccc

SEQ ID NO: 58024 - DNA, 15 bp, Homo sapiens
gttcccctcacccct

SEQ ID NO: 58025 - DNA, 15 bp, Homo sapiens
ttcccctcaccccta

SEQ ID NO: 58026 - DNA, 15 bp, Homo sapiens
tcccctcacccctac

SEQ ID NO: 58027 - DNA, 15 bp, Homo sapiens
cccctcacccctacc

SEQ ID NO: 58028 - DNA, 15 bp, Homo sapiens
ccctcacccctaccc

SEQ ID NO: 58029 - DNA, 15 bp, Homo sapiens
cctcacccctacccc

SEQ ID NO: 58030 - DNA, 15 bp, Homo sapiens
ctcacccctacccca

SEQ ID NO: 58031 - DNA, 15 bp, Homo sapiens
tcacccctaccccaa

SEQ ID NO: 58032 - DNA, 15 bp, Homo sapiens
cacccctaccccaag

SEQ ID NO: 58033 - DNA, 15 bp, Homo sapiens
acccctaccccaagc

SEQ ID NO: 58034 - DNA, 15 bp, Homo sapiens
cccctaccccaagct

SEQ ID NO: 58035 - DNA, 15 bp, Homo sapiens
ccctaccccaagctc

SEQ ID NO: 58036 - DNA, 15 bp, Homo sapiens
cctaccccaagctct

SEQ ID NO: 58037 - DNA, 15 bp, Homo sapiens
ctaccccaagctctt

SEQ ID NO: 58038 - DNA, 15 bp, Homo sapiens
taccccaagctcttg

SEQ ID NO: 58039 - DNA, 15 bp, Homo sapiens
accccaagctcttgc

SEQ ID NO: 58040 - DNA, 15 bp, Homo sapiens
ccccaagctcttgcc

SEQ ID NO: 58041 - DNA, 15 bp, Homo sapiens
cccaagctcttgcct

SEQ ID NO: 58042 - DNA, 15 bp, Homo sapiens
ccaagctcttgcctt

SEQ ID NO: 58043 - DNA, 15 bp, Homo sapiens
caagctcttgccttt

SEQ ID NO: 58044 - DNA, 15 bp, Homo sapiens
aagctcttgcctttt

SEQ ID NO: 58045 - DNA, 15 bp, Homo sapiens
agctcttgcctttta

SEQ ID NO: 58046 - DNA, 15 bp, Homo sapiens
gctcttgccttttaa

SEQ ID NO: 58047 - DNA, 15 bp, Homo sapiens
ctcttgccttttaat

SEQ ID NO: 58048 - DNA, 15 bp, Homo sapiens
tcttgccttttaatt

SEQ ID NO: 58049 - DNA, 15 bp, Homo sapiens
cttgccttttaatta

SEQ ID NO: 58050 - DNA, 15 bp, Homo sapiens
ttgccttttaattaa

SEQ ID NO: 58051 - DNA, 15 bp, Homo sapiens
tgccttttaattaag

SEQ ID NO: 58052 - DNA, 15 bp, Homo sapiens
gccttttaattaaga

SEQ ID NO: 58053 - DNA, 15 bp, Homo sapiens
ccttttaattaagaa

SEQ ID NO: 58054 - DNA, 15 bp, Homo sapiens
cttttaattaagaag

SEQ ID NO: 58055 - DNA, 15 bp, Homo sapiens
ttttaattaagaaga

SEQ ID NO: 58056 - DNA, 15 bp, Homo sapiens
tttaattaagaagag

SEQ ID NO: 58057 - DNA, 15 bp, Homo sapiens
ttaattaagaagagc

SEQ ID NO: 58058 - DNA, 15 bp, Homo sapiens
taattaagaagagct

SEQ ID NO: 58059 - DNA, 15 bp, Homo sapiens
aattaagaagagctg

SEQ ID NO: 58060 - DNA, 15 bp, Homo sapiens
attaagaagagctga

SEQ ID NO: 58061 - DNA, 15 bp, Homo sapiens
ttaagaagagctgat

SEQ ID NO: 58062 - DNA, 15 bp, Homo sapiens
taagaagagctgatc

SEQ ID NO: 58063 - DNA, 15 bp, Homo sapiens
aagaagagctgatcg

SEQ ID NO: 58064 - DNA, 15 bp, Homo sapiens
agaagagctgatcgg

SEQ ID NO: 58065 - DNA, 15 bp, Homo sapiens
gaagagctgatcggg

SEQ ID NO: 58066 - DNA, 15 bp, Homo sapiens
aagagctgatcgggg

SEQ ID NO: 58067 - DNA, 15 bp, Homo sapiens
agagctgatcggggg

SEQ ID NO: 58068 - DNA, 15 bp, Homo sapiens
gagctgatcggggga

SEQ ID NO: 58069 - DNA, 15 bp, Homo sapiens
agctgatcgggggag

SEQ ID NO: 58070 - DNA, 15 bp, Homo sapiens
gctgatcgggggagg

SEQ ID NO: 58071 - DNA, 15 bp, Homo sapiens
ctgatcgggggagga

SEQ ID NO: 58072 - DNA, 15 bp, Homo sapiens
tgatcgggggaggag

SEQ ID NO: 58073 - DNA, 15 bp, Homo sapiens
gatcgggggaggagt

SEQ ID NO: 58074 - DNA, 15 bp, Homo sapiens
atcgggggaggagtc

SEQ ID NO: 58075 - DNA, 15 bp, Homo sapiens
tcgggggaggagtcc

SEQ ID NO: 58076 - DNA, 15 bp, Homo sapiens
cgggggaggagtcca

SEQ ID NO: 58077 - DNA, 15 bp, Homo sapiens
gggggaggagtccag

SEQ ID NO: 58078 - DNA, 15 bp, Homo sapiens
ggggaggagtccaga

SEQ ID NO: 58079 - DNA, 15 bp, Homo sapiens
gggaggagtccagaa

SEQ ID NO: 58080 - DNA, 15 bp, Homo sapiens
ggaggagtccagaac

SEQ ID NO: 58081 - DNA, 15 bp, Homo sapiens
gaggagtccagaacg

SEQ ID NO: 58082 - DNA, 15 bp, Homo sapiens
aggagtccagaacga

SEQ ID NO: 58083 - DNA, 15 bp, Homo sapiens
ggagtccagaacgac

SEQ ID NO: 58084 - DNA, 15 bp, Homo sapiens
gagtccagaacgacc

SEQ ID NO: 58085 - DNA, 15 bp, Homo sapiens
agtccagaacgacca

SEQ ID NO: 58086 - DNA, 15 bp, Homo sapiens
gtccagaacgaccaa

SEQ ID NO: 58087 - DNA, 15 bp, Homo sapiens
tccagaacgaccaaa

SEQ ID NO: 58088 - DNA, 15 bp, Homo sapiens
ccagaacgaccaaac

SEQ ID NO: 58089 - DNA, 15 bp, Homo sapiens
cagaacgaccaaacc

SEQ ID NO: 58090 - DNA, 15 bp, Homo sapiens
agaacgaccaaaccc

SEQ ID NO: 58091 - DNA, 15 bp, Homo sapiens
gaacgaccaaaccct

SEQ ID NO: 58092 - DNA, 15 bp, Homo sapiens
aacgaccaaaccctg

SEQ ID NO: 58093 - DNA, 15 bp, Homo sapiens
acgaccaaaccctgg

SEQ ID NO: 58094 - DNA, 15 bp, Homo sapiens
cgaccaaaccctggg

SEQ ID NO: 58095 - DNA, 15 bp, Homo sapiens
gaccaaaccctgggg

SEQ ID NO: 58096 - DNA, 15 bp, Homo sapiens
accaaaccctggggc

SEQ ID NO: 58097 - DNA, 15 bp, Homo sapiens
ccaaaccctggggcg

SEQ ID NO: 58098 - DNA, 15 bp, Homo sapiens
caaaccctggggcga

SEQ ID NO: 58099 - DNA, 15 bp, Homo sapiens
aaaccctggggcgaa

SEQ ID NO: 58100 - DNA, 15 bp, Homo sapiens
aaccctggggcgaaa

SEQ ID NO: 58101 - DNA, 15 bp, Homo sapiens
accctggggcgaaaa

SEQ ID NO: 58102 - DNA, 15 bp, Homo sapiens
ccctggggcgaaaac

SEQ ID NO: 58103 - DNA, 15 bp, Homo sapiens
cctggggcgaaaact

SEQ ID NO: 58104 - DNA, 15 bp, Homo sapiens
ctggggcgaaaactg

SEQ ID NO: 58105 - DNA, 15 bp, Homo sapiens
tggggcgaaaactgc

SEQ ID NO: 58106 - DNA, 15 bp, Homo sapiens
ggggcgaaaactgcc

SEQ ID NO: 58107 - DNA, 15 bp, Homo sapiens
gggcgaaaactgcca

SEQ ID NO: 58108 - DNA, 15 bp, Homo sapiens
ggcgaaaactgccac

SEQ ID NO: 58109 - DNA, 15 bp, Homo sapiens
gcgaaaactgccacc

SEQ ID NO: 58110 - DNA, 15 bp, Homo sapiens
cgaaaactgccaccg

SEQ ID NO: 58111 - DNA, 15 bp, Homo sapiens
gaaaactgccaccgg

SEQ ID NO: 58112 - DNA, 15 bp, Homo sapiens
aaaactgccaccggg

SEQ ID NO: 58113 - DNA, 15 bp, Homo sapiens
aaactgccaccgggc

SEQ ID NO: 58114 - DNA, 15 bp, Homo sapiens
aactgccaccgggct

SEQ ID NO: 58115 - DNA, 15 bp, Homo sapiens
actgccaccgggctt

SEQ ID NO: 58116 - DNA, 15 bp, Homo sapiens
ctgccaccgggcttg

SEQ ID NO: 58117 - DNA, 15 bp, Homo sapiens
tgccaccgggcttgg

SEQ ID NO: 58118 - DNA, 15 bp, Homo sapiens
gccaccgggcttggc

SEQ ID NO: 58119 - DNA, 15 bp, Homo sapiens
ccaccgggcttggct

SEQ ID NO: 58120 - DNA, 15 bp, Homo sapiens
caccgggcttggctc

SEQ ID NO: 58121 - DNA, 15 bp, Homo sapiens
accgggcttggctct

SEQ ID NO: 58122 - DNA, 15 bp, Homo sapiens
ccgggcttggctctg

SEQ ID NO: 58123 - DNA, 15 bp, Homo sapiens
cgggcttggctctgt

SEQ ID NO: 58124 - DNA, 15 bp, Homo sapiens
gggcttggctctgtg

SEQ ID NO: 58125 - DNA, 15 bp, Homo sapiens
ggcttggctctgtgg

SEQ ID NO: 58126 - DNA, 15 bp, Homo sapiens
gcttggctctgtggc

SEQ ID NO: 58127 - DNA, 15 bp, Homo sapiens
cttggctctgtggcc

SEQ ID NO: 58128 - DNA, 15 bp, Homo sapiens
ttggctctgtggccg

SEQ ID NO: 58129 - DNA, 15 bp, Homo sapiens
tggctctgtggccgg

SEQ ID NO: 58130 - DNA, 15 bp, Homo sapiens
ggctctgtggccgga

SEQ ID NO: 58131 - DNA, 15 bp, Homo sapiens
gctctgtggccggaa

SEQ ID NO: 58132 - DNA, 15 bp, Homo sapiens
ctctgtggccggaac

SEQ ID NO: 58133 - DNA, 15 bp, Homo sapiens
tctgtggccggaaca

SEQ ID NO: 58134 - DNA, 15 bp, Homo sapiens
ctgtggccggaacaa

SEQ ID NO: 58135 - DNA, 15 bp, Homo sapiens
tgtggccggaacaaa

SEQ ID NO: 58136 - DNA, 15 bp, Homo sapiens
gtggccggaacaaaa

SEQ ID NO: 58137 - DNA, 15 bp, Homo sapiens
tggccggaacaaaag

SEQ ID NO: 58138 - DNA, 15 bp, Homo sapiens
ggccggaacaaaagg

SEQ ID NO: 58139 - DNA, 15 bp, Homo sapiens
gccggaacaaaaggc

SEQ ID NO: 58140 - DNA, 15 bp, Homo sapiens
ccggaacaaaaggcc

SEQ ID NO: 58141 - DNA, 15 bp, Homo sapiens
cggaacaaaaggcct

SEQ ID NO: 58142 - DNA, 15 bp, Homo sapiens
ggaacaaaaggcctg

SEQ ID NO: 58143 - DNA, 15 bp, Homo sapiens
gaacaaaaggcctga

SEQ ID NO: 58144 - DNA, 15 bp, Homo sapiens
aacaaaaggcctgag

SEQ ID NO: 58145 - DNA, 15 bp, Homo sapiens
acaaaaggcctgaga

SEQ ID NO: 58146 - DNA, 15 bp, Homo sapiens
caaaaggcctgagaa

SEQ ID NO: 58147 - DNA, 15 bp, Homo sapiens
aaaaggcctgagaag

SEQ ID NO: 58148 - DNA, 15 bp, Homo sapiens
aaaggcctgagaagg

SEQ ID NO: 58149 - DNA, 15 bp, Homo sapiens
aaggcctgagaaggg

SEQ ID NO: 58150 - DNA, 15 bp, Homo sapiens
aggcctgagaagggg

SEQ ID NO: 58151 - DNA, 15 bp, Homo sapiens
ggcctgagaaggggg

SEQ ID NO: 58152 - DNA, 15 bp, Homo sapiens
gcctgagaagggggt

SEQ ID NO: 58153 - DNA, 15 bp, Homo sapiens
cctgagaagggggtg

SEQ ID NO: 58154 - DNA, 15 bp, Homo sapiens
ctgagaagggggtgg

SEQ ID NO: 58155 - DNA, 15 bp, Homo sapiens
tgagaagggggtggg

SEQ ID NO: 58156 - DNA, 15 bp, Homo sapiens
gagaagggggtgggg

SEQ ID NO: 58157 - DNA, 15 bp, Homo sapiens
agaagggggtggggg

SEQ ID NO: 58158 - DNA, 15 bp, Homo sapiens
gaagggggtgggggt

SEQ ID NO: 58159 - DNA, 15 bp, Homo sapiens
aagggggtgggggtg

SEQ ID NO: 58160 - DNA, 15 bp, Homo sapiens
agggggtgggggtga

SEQ ID NO: 58161 - DNA, 15 bp, Homo sapiens
gggggtgggggtgag

SEQ ID NO: 58162 - DNA, 15 bp, Homo sapiens
ggggtgggggtgagg

SEQ ID NO: 58163 - DNA, 15 bp, Homo sapiens
gggtgggggtgaggg

SEQ ID NO: 58164 - DNA, 15 bp, Homo sapiens
ggtgggggtgagggt

SEQ ID NO: 58165 - DNA, 15 bp, Homo sapiens
gtgggggtgagggtt

SEQ ID NO: 58166 - DNA, 15 bp, Homo sapiens
tgggggtgagggtta

SEQ ID NO: 58167 - DNA, 15 bp, Homo sapiens
gggggtgagggttat

SEQ ID NO: 58168 - DNA, 15 bp, Homo sapiens
ggggtgagggttata

SEQ ID NO: 58169 - DNA, 15 bp, Homo sapiens
gggtgagggttatag

SEQ ID NO: 58170 - DNA, 15 bp, Homo sapiens
ggtgagggttatagg

SEQ ID NO: 58171 - DNA, 15 bp, Homo sapiens
gtgagggttatagga

SEQ ID NO: 58172 - DNA, 15 bp, Homo sapiens
tgagggttataggag

SEQ ID NO: 58173 - DNA, 15 bp, Homo sapiens
gagggttataggagt

SEQ ID NO: 58174 - DNA, 15 bp, Homo sapiens
agggttataggagtg

SEQ ID NO: 58175 - DNA, 15 bp, Homo sapiens
gggttataggagtgt

SEQ ID NO: 58176 - DNA, 15 bp, Homo sapiens
ggttataggagtgtg

SEQ ID NO: 58177 - DNA, 15 bp, Homo sapiens
gttataggagtgtgg

SEQ ID NO: 58178 - DNA, 15 bp, Homo sapiens
ttataggagtgtgga

SEQ ID NO: 58179 - DNA, 15 bp, Homo sapiens
tataggagtgtggag

SEQ ID NO: 58180 - DNA, 15 bp, Homo sapiens
ataggagtgtggaga

SEQ ID NO: 58181 - DNA, 15 bp, Homo sapiens
taggagtgtggagag

SEQ ID NO: 58182 - DNA, 15 bp, Homo sapiens
aggagtgtggagagc

SEQ ID NO: 58183 - DNA, 15 bp, Homo sapiens
ggagtgtggagagcc

SEQ ID NO: 58184 - DNA, 15 bp, Homo sapiens
gagtgtggagagcct

SEQ ID NO: 58185 - DNA, 15 bp, Homo sapiens
agtgtggagagcctg

SEQ ID NO: 58186 - DNA, 15 bp, Homo sapiens
gtgtggagagcctgg

SEQ ID NO: 58187 - DNA, 15 bp, Homo sapiens
tgtggagagcctggt

SEQ ID NO: 58188 - DNA, 15 bp, Homo sapiens
gtggagagcctggtg

SEQ ID NO: 58189 - DNA, 15 bp, Homo sapiens
tggagagcctggtgg

SEQ ID NO: 58190 - DNA, 15 bp, Homo sapiens
ggagagcctggtggc

SEQ ID NO: 58191 - DNA, 15 bp, Homo sapiens
gagagcctggtggcc

SEQ ID NO: 58192 - DNA, 15 bp, Homo sapiens
agagcctggtggccc

SEQ ID NO: 58193 - DNA, 15 bp, Homo sapiens
gagcctggtggcccc

SEQ ID NO: 58194 - DNA, 15 bp, Homo sapiens
agcctggtggccccc

SEQ ID NO: 58195 - DNA, 15 bp, Homo sapiens
gcctggtggcccccg

SEQ ID NO: 58196 - DNA, 15 bp, Homo sapiens
cctggtggcccccgc

SEQ ID NO: 58197 - DNA, 15 bp, Homo sapiens
ctggtggcccccgcc

SEQ ID NO: 58198 - DNA, 15 bp, Homo sapiens
tggtggcccccgccc

SEQ ID NO: 58199 - DNA, 15 bp, Homo sapiens
ggtggcccccgccca

SEQ ID NO: 58200 - DNA, 15 bp, Homo sapiens
gtggcccccgcccag

SEQ ID NO: 58201 - DNA, 15 bp, Homo sapiens
tggcccccgcccagg

SEQ ID NO: 58202 - DNA, 15 bp, Homo sapiens
ggcccccgcccaggg

SEQ ID NO: 58203 - DNA, 15 bp, Homo sapiens
gcccccgcccagggg

SEQ ID NO: 58204 - DNA, 15 bp, Homo sapiens
cccccgcccaggggc

SEQ ID NO: 58205 - DNA, 15 bp, Homo sapiens
ccccgcccaggggcg

SEQ ID NO: 58206 - DNA, 15 bp, Homo sapiens
cccgcccaggggcgc

SEQ ID NO: 58207 - DNA, 15 bp, Homo sapiens
ccgcccaggggcgcc

SEQ ID NO: 58208 - DNA, 15 bp, Homo sapiens
cgcccaggggcgcct

SEQ ID NO: 58209 - DNA, 15 bp, Homo sapiens
gcccaggggcgccta

SEQ ID NO: 58210 - DNA, 15 bp, Homo sapiens
cccaggggcgcctaa

SEQ ID NO: 58211 - DNA, 15 bp, Homo sapiens
ccaggggcgcctaag

SEQ ID NO: 58212 - DNA, 15 bp, Homo sapiens
caggggcgcctaagt

SEQ ID NO: 58213 - DNA, 15 bp, Homo sapiens
aggggcgcctaagtc

SEQ ID NO: 58214 - DNA, 15 bp, Homo sapiens
ggggcgcctaagtcc

SEQ ID NO: 58215 - DNA, 15 bp, Homo sapiens
gggcgcctaagtccc

SEQ ID NO: 58216 - DNA, 15 bp, Homo sapiens
ggcgcctaagtccct

SEQ ID NO: 58217 - DNA, 15 bp, Homo sapiens
gcgcctaagtccctg

SEQ ID NO: 58218 - DNA, 15 bp, Homo sapiens
cgcctaagtccctga

SEQ ID NO: 58219 - DNA, 15 bp, Homo sapiens
gcctaagtccctgag

SEQ ID NO: 58220 - DNA, 15 bp, Homo sapiens
cctaagtccctgagc

SEQ ID NO: 58221 - DNA, 15 bp, Homo sapiens
ctaagtccctgagct

SEQ ID NO: 58222 - DNA, 15 bp, Homo sapiens
taagtccctgagctc

SEQ ID NO: 58223 - DNA, 15 bp, Homo sapiens
aagtccctgagctcc

SEQ ID NO: 58224 - DNA, 15 bp, Homo sapiens
agtccctgagctccc

SEQ ID NO: 58225 - DNA, 15 bp, Homo sapiens
gtccctgagctccct

SEQ ID NO: 58226 - DNA, 15 bp, Homo sapiens
tccctgagctccctg

SEQ ID NO: 58227 - DNA, 15 bp, Homo sapiens
ccctgagctccctga

SEQ ID NO: 58228 - DNA, 15 bp, Homo sapiens
cctgagctccctgaa

SEQ ID NO: 58229 - DNA, 15 bp, Homo sapiens
ctgagctccctgaag

SEQ ID NO: 58230 - DNA, 15 bp, Homo sapiens
tgagctccctgaaga

SEQ ID NO: 58231 - DNA, 15 bp, Homo sapiens
gagctccctgaagag

SEQ ID NO: 58232 - DNA, 15 bp, Homo sapiens
agctccctgaagagt

SEQ ID NO: 58233 - DNA, 15 bp, Homo sapiens
gctccctgaagagtg

SEQ ID NO: 58234 - DNA, 15 bp, Homo sapiens
ctccctgaagagtgg

SEQ ID NO: 58235 - DNA, 15 bp, Homo sapiens
tccctgaagagtggc

SEQ ID NO: 58236 - DNA, 15 bp, Homo sapiens
ccctgaagagtggca

SEQ ID NO: 58237 - DNA, 15 bp, Homo sapiens
cctgaagagtggcaa

SEQ ID NO: 58238 - DNA, 15 bp, Homo sapiens
ctgaagagtggcaag

SEQ ID NO: 58239 - DNA, 15 bp, Homo sapiens
tgaagagtggcaaga

SEQ ID NO: 58240 - DNA, 15 bp, Homo sapiens
gaagagtggcaagag

SEQ ID NO: 58241 - DNA, 15 bp, Homo sapiens
aagagtggcaagagg

SEQ ID NO: 58242 - DNA, 15 bp, Homo sapiens
agagtggcaagagga

SEQ ID NO: 58243 - DNA, 15 bp, Homo sapiens
gagtggcaagaggat

SEQ ID NO: 58244 - DNA, 15 bp, Homo sapiens
agtggcaagaggata

SEQ ID NO: 58245 - DNA, 15 bp, Homo sapiens
gtggcaagaggataa

SEQ ID NO: 58246 - DNA, 15 bp, Homo sapiens
tggcaagaggataac

SEQ ID NO: 58247 - DNA, 15 bp, Homo sapiens
ggcaagaggataacg

SEQ ID NO: 58248 - DNA, 15 bp, Homo sapiens
gcaagaggataacgc

SEQ ID NO: 58249 - DNA, 15 bp, Homo sapiens
caagaggataacgca

SEQ ID NO: 58250 - DNA, 15 bp, Homo sapiens
aagaggataacgcag

SEQ ID NO: 58251 - DNA, 15 bp, Homo sapiens
agaggataacgcagc

SEQ ID NO: 58252 - DNA, 15 bp, Homo sapiens
gaggataacgcagcc

SEQ ID NO: 58253 - DNA, 15 bp, Homo sapiens
aggataacgcagccg

SEQ ID NO: 58254 - DNA, 15 bp, Homo sapiens
ggataacgcagccgc

SEQ ID NO: 58255 - DNA, 15 bp, Homo sapiens
gataacgcagccgcg

SEQ ID NO: 58256 - DNA, 15 bp, Homo sapiens
ataacgcagccgcgc

SEQ ID NO: 58257 - DNA, 15 bp, Homo sapiens
taacgcagccgcgcg

SEQ ID NO: 58258 - DNA, 15 bp, Homo sapiens
aacgcagccgcgcgt

SEQ ID NO: 58259 - DNA, 15 bp, Homo sapiens
acgcagccgcgcgtt

SEQ ID NO: 58260 - DNA, 15 bp, Homo sapiens
cgcagccgcgcgttc

SEQ ID NO: 58261 - DNA, 15 bp, Homo sapiens
gcagccgcgcgttcc

SEQ ID NO: 58262 - DNA, 15 bp, Homo sapiens
cagccgcgcgttccg

SEQ ID NO: 58263 - DNA, 15 bp, Homo sapiens
agccgcgcgttccgg

SEQ ID NO: 58264 - DNA, 15 bp, Homo sapiens
gccgcgcgttccggc

SEQ ID NO: 58265 - DNA, 15 bp, Homo sapiens
ccgcgcgttccggca

SEQ ID NO: 58266 - DNA, 15 bp, Homo sapiens
cgcgcgttccggcag

SEQ ID NO: 58267 - DNA, 15 bp, Homo sapiens
gcgcgttccggcagt

SEQ ID NO: 58268 - DNA, 15 bp, Homo sapiens
cgcgttccggcagtt

SEQ ID NO: 58269 - DNA, 15 bp, Homo sapiens
gcgttccggcagttc

SEQ ID NO: 58270 - DNA, 15 bp, Homo sapiens
cgttccggcagttcg

SEQ ID NO: 58271 - DNA, 15 bp, Homo sapiens
gttccggcagttcgc

SEQ ID NO: 58272 - DNA, 15 bp, Homo sapiens
ttccggcagttcgct

SEQ ID NO: 58273 - DNA, 15 bp, Homo sapiens
tccggcagttcgctg

SEQ ID NO: 58274 - DNA, 15 bp, Homo sapiens
ccggcagttcgctgt

SEQ ID NO: 58275 - DNA, 15 bp, Homo sapiens
cggcagttcgctgtc

SEQ ID NO: 58276 - DNA, 15 bp, Homo sapiens
ggcagttcgctgtcc

SEQ ID NO: 58277 - DNA, 15 bp, Homo sapiens
gcagttcgctgtccc

SEQ ID NO: 58278 - DNA, 15 bp, Homo sapiens
cagttcgctgtcccc

SEQ ID NO: 58279 - DNA, 15 bp, Homo sapiens
agttcgctgtccccc

SEQ ID NO: 58280 - DNA, 15 bp, Homo sapiens
gttcgctgtcccccg

SEQ ID NO: 58281 - DNA, 15 bp, Homo sapiens
ttcgctgtcccccgg

SEQ ID NO: 58282 - DNA, 15 bp, Homo sapiens
tcgctgtcccccggg

SEQ ID NO: 58283 - DNA, 15 bp, Homo sapiens
cgctgtcccccgggg

SEQ ID NO: 58284 - DNA, 15 bp, Homo sapiens
gctgtcccccggggg

SEQ ID NO: 58285 - DNA, 15 bp, Homo sapiens
ctgtcccccgggggt

SEQ ID NO: 58286 - DNA, 15 bp, Homo sapiens
tgtcccccgggggtg

SEQ ID NO: 58287 - DNA, 15 bp, Homo sapiens
gtcccccgggggtgc

SEQ ID NO: 58288 - DNA, 15 bp, Homo sapiens
tcccccgggggtgca

SEQ ID NO: 58289 - DNA, 15 bp, Homo sapiens
cccccgggggtgcag

SEQ ID NO: 58290 - DNA, 15 bp, Homo sapiens
ccccgggggtgcagg

SEQ ID NO: 58291 - DNA, 15 bp, Homo sapiens
cccgggggtgcaggc

SEQ ID NO: 58292 - DNA, 15 bp, Homo sapiens
ccgggggtgcaggcg

SEQ ID NO: 58293 - DNA, 15 bp, Homo sapiens
cgggggtgcaggcgg

SEQ ID NO: 58294 - DNA, 15 bp, Homo sapiens
gggggtgcaggcggg

SEQ ID NO: 58295 - DNA, 15 bp, Homo sapiens
ggggtgcaggcgggg

SEQ ID NO: 58296 - DNA, 15 bp, Homo sapiens
gggtgcaggcggggg

SEQ ID NO: 58297 - DNA, 15 bp, Homo sapiens
ggtgcaggcgggggc

SEQ ID NO: 58298 - DNA, 15 bp, Homo sapiens
gtgcaggcgggggcg

SEQ ID NO: 58299 - DNA, 15 bp, Homo sapiens
tgcaggcgggggcgg

SEQ ID NO: 58300 - DNA, 15 bp, Homo sapiens
gcaggcgggggcggg

SEQ ID NO: 58301 - DNA, 15 bp, Homo sapiens
caggcgggggcggga

SEQ ID NO: 58302 - DNA, 15 bp, Homo sapiens
aggcgggggcgggag

SEQ ID NO: 58303 - DNA, 15 bp, Homo sapiens
ggcgggggcgggaga

SEQ ID NO: 58304 - DNA, 15 bp, Homo sapiens
gcgggggcgggagag

SEQ ID NO: 58305 - DNA, 15 bp, Homo sapiens
cgggggcgggagagg

SEQ ID NO: 58306 - DNA, 15 bp, Homo sapiens
gggggcgggagaggt

SEQ ID NO: 58307 - DNA, 15 bp, Homo sapiens
ggggcgggagaggta

SEQ ID NO: 58308 - DNA, 15 bp, Homo sapiens
gggcgggagaggtag

SEQ ID NO: 58309 - DNA, 15 bp, Homo sapiens
ggcgggagaggtaga

SEQ ID NO: 58310 - DNA, 15 bp, Homo sapiens
gcgggagaggtagaa

SEQ ID NO: 58311 - DNA, 15 bp, Homo sapiens
cgggagaggtagaac

SEQ ID NO: 58312 - DNA, 15 bp, Homo sapiens
gggagaggtagaaca

SEQ ID NO: 58313 - DNA, 15 bp, Homo sapiens
ggagaggtagaacac

SEQ ID NO: 58314 - DNA, 15 bp, Homo sapiens
gagaggtagaacaca

SEQ ID NO: 58315 - DNA, 15 bp, Homo sapiens
agaggtagaacacag

SEQ ID NO: 58316 - DNA, 15 bp, Homo sapiens
gaggtagaacacagg

SEQ ID NO: 58317 - DNA, 15 bp, Homo sapiens
aggtagaacacaggt

SEQ ID NO: 58318 - DNA, 15 bp, Homo sapiens
ggtagaacacaggtc

SEQ ID NO: 58319 - DNA, 15 bp, Homo sapiens
gtagaacacaggtct

SEQ ID NO: 58320 - DNA, 15 bp, Homo sapiens
tagaacacaggtctg

SEQ ID NO: 58321 - DNA, 15 bp, Homo sapiens
agaacacaggtctgg

SEQ ID NO: 58322 - DNA, 15 bp, Homo sapiens
gaacacaggtctggg

SEQ ID NO: 58323 - DNA, 15 bp, Homo sapiens
aacacaggtctgggc

SEQ ID NO: 58324 - DNA, 15 bp, Homo sapiens
acacaggtctgggcg

SEQ ID NO: 58325 - DNA, 15 bp, Homo sapiens
cacaggtctgggcgg

SEQ ID NO: 58326 - DNA, 15 bp, Homo sapiens
acaggtctgggcggc

SEQ ID NO: 58327 - DNA, 15 bp, Homo sapiens
caggtctgggcggct

SEQ ID NO: 58328 - DNA, 15 bp, Homo sapiens
aggtctgggcggctc

SEQ ID NO: 58329 - DNA, 15 bp, Homo sapiens
ggtctgggcggctcc

SEQ ID NO: 58330 - DNA, 15 bp, Homo sapiens
gtctgggcggctccg

SEQ ID NO: 58331 - DNA, 15 bp, Homo sapiens
tctgggcggctccgc

SEQ ID NO: 58332 - DNA, 15 bp, Homo sapiens
ctgggcggctccgcg

SEQ ID NO: 58333 - DNA, 15 bp, Homo sapiens
tgggcggctccgcgc

SEQ ID NO: 58334 - DNA, 15 bp, Homo sapiens
gggcggctccgcgcc

SEQ ID NO: 58335 - DNA, 15 bp, Homo sapiens
ggcggctccgcgccg

SEQ ID NO: 58336 - DNA, 15 bp, Homo sapiens
gcggctccgcgccgc

SEQ ID NO: 58337 - DNA, 15 bp, Homo sapiens
cggctccgcgccgct

SEQ ID NO: 58338 - DNA, 15 bp, Homo sapiens
ggctccgcgccgctt

SEQ ID NO: 58339 - DNA, 15 bp, Homo sapiens
gctccgcgccgcttc

SEQ ID NO: 58340 - DNA, 15 bp, Homo sapiens
ctccgcgccgcttct

SEQ ID NO: 58341 - DNA, 15 bp, Homo sapiens
tccgcgccgcttcta

SEQ ID NO: 58342 - DNA, 15 bp, Homo sapiens
ccgcgccgcttctat

SEQ ID NO: 58343 - DNA, 15 bp, Homo sapiens
cgcgccgcttctatc

SEQ ID NO: 58344 - DNA, 15 bp, Homo sapiens
gcgccgcttctatct

SEQ ID NO: 58345 - DNA, 15 bp, Homo sapiens
cgccgcttctatctc

SEQ ID NO: 58346 - DNA, 15 bp, Homo sapiens
gccgcttctatctca

SEQ ID NO: 58347 - DNA, 15 bp, Homo sapiens
ccgcttctatctcac

SEQ ID NO: 58348 - DNA, 15 bp, Homo sapiens
cgcttctatctcacc

SEQ ID NO: 58349 - DNA, 15 bp, Homo sapiens
gcttctatctcaccc

SEQ ID NO: 58350 - DNA, 15 bp, Homo sapiens
cttctatctcacccg

SEQ ID NO: 58351 - DNA, 15 bp, Homo sapiens
ttctatctcacccgc

SEQ ID NO: 58352 - DNA, 15 bp, Homo sapiens
tctatctcacccgcc

SEQ ID NO: 58353 - DNA, 15 bp, Homo sapiens
ctatctcacccgcca

SEQ ID NO: 58354 - DNA, 15 bp, Homo sapiens
tatctcacccgccaa

SEQ ID NO: 58355 - DNA, 15 bp, Homo sapiens
atctcacccgccaag

SEQ ID NO: 58356 - DNA, 15 bp, Homo sapiens
tctcacccgccaagc

SEQ ID NO: 58357 - DNA, 15 bp, Homo sapiens
ctcacccgccaagcc

SEQ ID NO: 58358 - DNA, 15 bp, Homo sapiens
tcacccgccaagccc

SEQ ID NO: 58359 - DNA, 15 bp, Homo sapiens
cacccgccaagcccc

SEQ ID NO: 58360 - DNA, 15 bp, Homo sapiens
acccgccaagcccct

SEQ ID NO: 58361 - DNA, 15 bp, Homo sapiens
cccgccaagcccctc

SEQ ID NO: 58362 - DNA, 15 bp, Homo sapiens
ccgccaagcccctca

SEQ ID NO: 58363 - DNA, 15 bp, Homo sapiens
cgccaagcccctcac

SEQ ID NO: 58364 - DNA, 15 bp, Homo sapiens
gccaagcccctcacc

SEQ ID NO: 58365 - DNA, 15 bp, Homo sapiens
ccaagcccctcacct

SEQ ID NO: 58366 - DNA, 15 bp, Homo sapiens
caagcccctcacctc

SEQ ID NO: 58367 - DNA, 15 bp, Homo sapiens
aagcccctcacctcc

SEQ ID NO: 58368 - DNA, 15 bp, Homo sapiens
agcccctcacctcca

SEQ ID NO: 58369 - DNA, 15 bp, Homo sapiens
gcccctcacctccac

SEQ ID NO: 58370 - DNA, 15 bp, Homo sapiens
cccctcacctccacc

SEQ ID NO: 58371 - DNA, 15 bp, Homo sapiens
ccctcacctccaccc

SEQ ID NO: 58372 - DNA, 15 bp, Homo sapiens
cctcacctccaccca

SEQ ID NO: 58373 - DNA, 15 bp, Homo sapiens
ctcacctccacccac

SEQ ID NO: 58374 - DNA, 15 bp, Homo sapiens
tcacctccacccacc

SEQ ID NO: 58375 - DNA, 15 bp, Homo sapiens
cacctccacccaccg

SEQ ID NO: 58376 - DNA, 15 bp, Homo sapiens
acctccacccaccgc

SEQ ID NO: 58377 - DNA, 15 bp, Homo sapiens
cctccacccaccgcc

SEQ ID NO: 58378 - DNA, 15 bp, Homo sapiens
ctccacccaccgcca

SEQ ID NO: 58379 - DNA, 15 bp, Homo sapiens
tccacccaccgccag

SEQ ID NO: 58380 - DNA, 15 bp, Homo sapiens
ccacccaccgccagt

SEQ ID NO: 58381 - DNA, 15 bp, Homo sapiens
cacccaccgccagtc

SEQ ID NO: 58382 - DNA, 15 bp, Homo sapiens
acccaccgccagtcc

SEQ ID NO: 58383 - DNA, 15 bp, Homo sapiens
cccaccgccagtccc

SEQ ID NO: 58384 - DNA, 15 bp, Homo sapiens
ccaccgccagtcccc

SEQ ID NO: 58385 - DNA, 15 bp, Homo sapiens
caccgccagtcccct

SEQ ID NO: 58386 - DNA, 15 bp, Homo sapiens
accgccagtcccctg

SEQ ID NO: 58387 - DNA, 15 bp, Homo sapiens
ccgccagtcccctgc

SEQ ID NO: 58388 - DNA, 15 bp, Homo sapiens
cgccagtcccctgcc

SEQ ID NO: 58389 - DNA, 15 bp, Homo sapiens
gccagtcccctgccc

SEQ ID NO: 58390 - DNA, 15 bp, Homo sapiens
ccagtcccctgccca

SEQ ID NO: 58391 - DNA, 15 bp, Homo sapiens
cagtcccctgcccac

SEQ ID NO: 58392 - DNA, 15 bp, Homo sapiens
agtcccctgcccacc

SEQ ID NO: 58393 - DNA, 15 bp, Homo sapiens
gtcccctgcccaccc

SEQ ID NO: 58394 - DNA, 15 bp, Homo sapiens
tcccctgcccacccg

SEQ ID NO: 58395 - DNA, 15 bp, Homo sapiens
cccctgcccacccgg

SEQ ID NO: 58396 - DNA, 15 bp, Homo sapiens
ccctgcccacccggg

SEQ ID NO: 58397 - DNA, 15 bp, Homo sapiens
cctgcccacccgggt

SEQ ID NO: 58398 - DNA, 15 bp, Homo sapiens
ctgcccacccgggtg

SEQ ID NO: 58399 - DNA, 15 bp, Homo sapiens
tgcccacccgggtgg

SEQ ID NO: 58400 - DNA, 15 bp, Homo sapiens
gcccacccgggtggc

SEQ ID NO: 58401 - DNA, 15 bp, Homo sapiens
cccacccgggtggcg

SEQ ID NO: 58402 - DNA, 15 bp, Homo sapiens
ccacccgggtggcgg

SEQ ID NO: 58403 - DNA, 15 bp, Homo sapiens
cacccgggtggcggc

SEQ ID NO: 58404 - DNA, 15 bp, Homo sapiens
acccgggtggcggcg

SEQ ID NO: 58405 - DNA, 15 bp, Homo sapiens
cccgggtggcggcgg

SEQ ID NO: 58406 - DNA, 15 bp, Homo sapiens
ccgggtggcggcggc

SEQ ID NO: 58407 - DNA, 15 bp, Homo sapiens
cgggtggcggcggcg

SEQ ID NO: 58408 - DNA, 15 bp, Homo sapiens
gggtggcggcggcgg

SEQ ID NO: 58409 - DNA, 15 bp, Homo sapiens
ggtggcggcggcggc

SEQ ID NO: 58410 - DNA, 15 bp, Homo sapiens
gtggcggcggcggct

SEQ ID NO: 58411 - DNA, 15 bp, Homo sapiens
tggcggcggcggctc

SEQ ID NO: 58412 - DNA, 15 bp, Homo sapiens
ggcggcggcggctca

SEQ ID NO: 58413 - DNA, 15 bp, Homo sapiens
gcggcggcggctcag

SEQ ID NO: 58414 - DNA, 15 bp, Homo sapiens
cggcggcggctcagc

SEQ ID NO: 58415 - DNA, 15 bp, Homo sapiens
ggcggcggctcagcg

SEQ ID NO: 58416 - DNA, 15 bp, Homo sapiens
gcggcggctcagcga

SEQ ID NO: 58417 - DNA, 15 bp, Homo sapiens
cggcggctcagcgac

SEQ ID NO: 58418 - DNA, 15 bp, Homo sapiens
ggcggctcagcgact

SEQ ID NO: 58419 - DNA, 15 bp, Homo sapiens
gcggctcagcgacta

SEQ ID NO: 58420 - DNA, 15 bp, Homo sapiens
cggctcagcgactag

SEQ ID NO: 58421 - DNA, 15 bp, Homo sapiens
ggctcagcgactagc

SEQ ID NO: 58422 - DNA, 15 bp, Homo sapiens
gctcagcgactagcc

SEQ ID NO: 58423 - DNA, 15 bp, Homo sapiens
ctcagcgactagccg

SEQ ID NO: 58424 - DNA, 15 bp, Homo sapiens
tcagcgactagccgg

SEQ ID NO: 58425 - DNA, 15 bp, Homo sapiens
cagcgactagccggc

SEQ ID NO: 58426 - DNA, 15 bp, Homo sapiens
agcgactagccggcc

SEQ ID NO: 58427 - DNA, 15 bp, Homo sapiens
gcgactagccggccg

SEQ ID NO: 58428 - DNA, 15 bp, Homo sapiens
cgactagccggccgc

SEQ ID NO: 58429 - DNA, 15 bp, Homo sapiens
gactagccggccgcc

SEQ ID NO: 58430 - DNA, 15 bp, Homo sapiens
actagccggccgccc

SEQ ID NO: 58431 - DNA, 15 bp, Homo sapiens
ctagccggccgccct

SEQ ID NO: 58432 - DNA, 15 bp, Homo sapiens
tagccggccgccctc

SEQ ID NO: 58433 - DNA, 15 bp, Homo sapiens
agccggccgccctcc

SEQ ID NO: 58434 - DNA, 15 bp, Homo sapiens
gccggccgccctcca

SEQ ID NO: 58435 - DNA, 15 bp, Homo sapiens
ccggccgccctccac

SEQ ID NO: 58436 - DNA, 15 bp, Homo sapiens
cggccgccctccacc

SEQ ID NO: 58437 - DNA, 15 bp, Homo sapiens
ggccgccctccaccg

SEQ ID NO: 58438 - DNA, 15 bp, Homo sapiens
gccgccctccaccgg

SEQ ID NO: 58439 - DNA, 15 bp, Homo sapiens
ccgccctccaccggc

SEQ ID NO: 58440 - DNA, 15 bp, Homo sapiens
cgccctccaccggcg

SEQ ID NO: 58441 - DNA, 15 bp, Homo sapiens
gccctccaccggcgc

SEQ ID NO: 58442 - DNA, 15 bp, Homo sapiens
ccctccaccggcgcc

SEQ ID NO: 58443 - DNA, 15 bp, Homo sapiens
cctccaccggcgcct

SEQ ID NO: 58444 - DNA, 15 bp, Homo sapiens
ctccaccggcgcctc

SEQ ID NO: 58445 - DNA, 15 bp, Homo sapiens
tccaccggcgcctcc

SEQ ID NO: 58446 - DNA, 15 bp, Homo sapiens
ccaccggcgcctccg

SEQ ID NO: 58447 - DNA, 15 bp, Homo sapiens
caccggcgcctccgg

SEQ ID NO: 58448 - DNA, 15 bp, Homo sapiens
accggcgcctccgga

SEQ ID NO: 58449 - DNA, 15 bp, Homo sapiens
ccggcgcctccggac

SEQ ID NO: 58450 - DNA, 15 bp, Homo sapiens
cggcgcctccggacg

SEQ ID NO: 58451 - DNA, 15 bp, Homo sapiens
ggcgcctccggacgc

SEQ ID NO: 58452 - DNA, 15 bp, Homo sapiens
gcgcctccggacgca

SEQ ID NO: 58453 - DNA, 15 bp, Homo sapiens
cgcctccggacgcaa

SEQ ID NO: 58454 - DNA, 15 bp, Homo sapiens
gcctccggacgcaac

SEQ ID NO: 58455 - DNA, 15 bp, Homo sapiens
cctccggacgcaacc

SEQ ID NO: 58456 - DNA, 15 bp, Homo sapiens
ctccggacgcaacct

SEQ ID NO: 58457 - DNA, 15 bp, Homo sapiens
tccggacgcaacctc

SEQ ID NO: 58458 - DNA, 15 bp, Homo sapiens
ccggacgcaacctcg

SEQ ID NO: 58459 - DNA, 15 bp, Homo sapiens
cggacgcaacctcgc

SEQ ID NO: 58460 - DNA, 15 bp, Homo sapiens
ggacgcaacctcgcc

SEQ ID NO: 58461 - DNA, 15 bp, Homo sapiens
gacgcaacctcgccc

SEQ ID NO: 58462 - DNA, 15 bp, Homo sapiens
acgcaacctcgccct

SEQ ID NO: 58463 - DNA, 15 bp, Homo sapiens
cgcaacctcgccctg

SEQ ID NO: 58464 - DNA, 15 bp, Homo sapiens
gcaacctcgccctgg

SEQ ID NO: 58465 - DNA, 15 bp, Homo sapiens
caacctcgccctggc

SEQ ID NO: 58466 - DNA, 15 bp, Homo sapiens
aacctcgccctggca

SEQ ID NO: 58467 - DNA, 15 bp, Homo sapiens
acctcgccctggcag

SEQ ID NO: 58468 - DNA, 15 bp, Homo sapiens
cctcgccctggcagg

SEQ ID NO: 58469 - DNA, 15 bp, Homo sapiens
ctcgccctggcaggg

SEQ ID NO: 58470 - DNA, 15 bp, Homo sapiens
tcgccctggcagggc

SEQ ID NO: 58471 - DNA, 15 bp, Homo sapiens
cgccctggcagggcg

SEQ ID NO: 58472 - DNA, 15 bp, Homo sapiens
gccctggcagggcgg

SEQ ID NO: 58473 - DNA, 15 bp, Homo sapiens
ccctggcagggcggt

SEQ ID NO: 58474 - DNA, 15 bp, Homo sapiens
cctggcagggcggtc

SEQ ID NO: 58475 - DNA, 15 bp, Homo sapiens
ctggcagggcggtct

SEQ ID NO: 58476 - DNA, 15 bp, Homo sapiens
tggcagggcggtctg

SEQ ID NO: 58477 - DNA, 15 bp, Homo sapiens
ggcagggcggtctgc

SEQ ID NO: 58478 - DNA, 15 bp, Homo sapiens
gcagggcggtctgcg

SEQ ID NO: 58479 - DNA, 15 bp, Homo sapiens
cagggcggtctgcgc

SEQ ID NO: 58480 - DNA, 15 bp, Homo sapiens
agggcggtctgcgcg

SEQ ID NO: 58481 - DNA, 15 bp, Homo sapiens
gggcggtctgcgcgt

SEQ ID NO: 58482 - DNA, 15 bp, Homo sapiens
ggcggtctgcgcgtc

SEQ ID NO: 58483 - DNA, 15 bp, Homo sapiens
gcggtctgcgcgtcc

SEQ ID NO: 58484 - DNA, 15 bp, Homo sapiens
cggtctgcgcgtcca

SEQ ID NO: 58485 - DNA, 15 bp, Homo sapiens
ggtctgcgcgtccag

SEQ ID NO: 58486 - DNA, 15 bp, Homo sapiens
gtctgcgcgtccagc

SEQ ID NO: 58487 - DNA, 15 bp, Homo sapiens
tctgcgcgtccagct

SEQ ID NO: 58488 - DNA, 15 bp, Homo sapiens
ctgcgcgtccagctg

SEQ ID NO: 58489 - DNA, 15 bp, Homo sapiens
tgcgcgtccagctga

SEQ ID NO: 58490 - DNA, 15 bp, Homo sapiens
gcgcgtccagctgat

SEQ ID NO: 58491 - DNA, 15 bp, Homo sapiens
cgcgtccagctgatt

SEQ ID NO: 58492 - DNA, 15 bp, Homo sapiens
gcgtccagctgattg

SEQ ID NO: 58493 - DNA, 15 bp, Homo sapiens
cgtccagctgattgg

SEQ ID NO: 58494 - DNA, 15 bp, Homo sapiens
gtccagctgattggt

SEQ ID NO: 58495 - DNA, 15 bp, Homo sapiens
tccagctgattggtg

SEQ ID NO: 58496 - DNA, 15 bp, Homo sapiens
ccagctgattggtgg

SEQ ID NO: 58497 - DNA, 15 bp, Homo sapiens
cagctgattggtggc

SEQ ID NO: 58498 - DNA, 15 bp, Homo sapiens
agctgattggtggct

SEQ ID NO: 58499 - DNA, 15 bp, Homo sapiens
gctgattggtggctc

SEQ ID NO: 58500 - DNA, 15 bp, Homo sapiens
ctgattggtggctct

SEQ ID NO: 58501 - DNA, 15 bp, Homo sapiens
tgattggtggctctg

SEQ ID NO: 58502 - DNA, 15 bp, Homo sapiens
gattggtggctctgt

SEQ ID NO: 58503 - DNA, 15 bp, Homo sapiens
attggtggctctgtc

SEQ ID NO: 58504 - DNA, 15 bp, Homo sapiens
ttggtggctctgtcc

SEQ ID NO: 58505 - DNA, 15 bp, Homo sapiens
tggtggctctgtcca

SEQ ID NO: 58506 - DNA, 15 bp, Homo sapiens
ggtggctctgtccag

SEQ ID NO: 58507 - DNA, 15 bp, Homo sapiens
gtggctctgtccagc

SEQ ID NO: 58508 - DNA, 15 bp, Homo sapiens
tggctctgtccagcc

SEQ ID NO: 58509 - DNA, 15 bp, Homo sapiens
ggctctgtccagccg

SEQ ID NO: 58510 - DNA, 15 bp, Homo sapiens
gctctgtccagccgc

SEQ ID NO: 58511 - DNA, 15 bp, Homo sapiens
ctctgtccagccgcc

SEQ ID NO: 58512 - DNA, 15 bp, Homo sapiens
tctgtccagccgccg

SEQ ID NO: 58513 - DNA, 15 bp, Homo sapiens
ctgtccagccgccgc

SEQ ID NO: 58514 - DNA, 15 bp, Homo sapiens
tgtccagccgccgca

SEQ ID NO: 58515 - DNA, 15 bp, Homo sapiens
gtccagccgccgcac

SEQ ID NO: 58516 - DNA, 15 bp, Homo sapiens
tccagccgccgcacg

SEQ ID NO: 58517 - DNA, 15 bp, Homo sapiens
ccagccgccgcacgg

SEQ ID NO: 58518 - DNA, 15 bp, Homo sapiens
cagccgccgcacgga

SEQ ID NO: 58519 - DNA, 15 bp, Homo sapiens
agccgccgcacggag

SEQ ID NO: 58520 - DNA, 15 bp, Homo sapiens
gccgccgcacggagc

SEQ ID NO: 58521 - DNA, 15 bp, Homo sapiens
ccgccgcacggagct

SEQ ID NO: 58522 - DNA, 15 bp, Homo sapiens
cgccgcacggagcta

SEQ ID NO: 58523 - DNA, 15 bp, Homo sapiens
gccgcacggagctaa

SEQ ID NO: 58524 - DNA, 15 bp, Homo sapiens
ccgcacggagctaaa

SEQ ID NO: 58525 - DNA, 15 bp, Homo sapiens
cgcacggagctaaaa

SEQ ID NO: 58526 - DNA, 15 bp, Homo sapiens
gcacggagctaaaag

SEQ ID NO: 58527 - DNA, 15 bp, Homo sapiens
cacggagctaaaagt

SEQ ID NO: 58528 - DNA, 15 bp, Homo sapiens
acggagctaaaagtg

SEQ ID NO: 58529 - DNA, 15 bp, Homo sapiens
cggagctaaaagtgt

SEQ ID NO: 58530 - DNA, 15 bp, Homo sapiens
ggagctaaaagtgtt

SEQ ID NO: 58531 - DNA, 15 bp, Homo sapiens
gagctaaaagtgttc

SEQ ID NO: 58532 - DNA, 15 bp, Homo sapiens
agctaaaagtgttct

SEQ ID NO: 58533 - DNA, 15 bp, Homo sapiens
gctaaaagtgttctt

SEQ ID NO: 58534 - DNA, 15 bp, Homo sapiens
ctaaaagtgttcttc

SEQ ID NO: 58535 - DNA, 15 bp, Homo sapiens
taaaagtgttcttct

SEQ ID NO: 58536 - DNA, 15 bp, Homo sapiens
aaaagtgttcttctc

SEQ ID NO: 58537 - DNA, 15 bp, Homo sapiens
aaagtgttcttctcc

SEQ ID NO: 58538 - DNA, 15 bp, Homo sapiens
aagtgttcttctcca

SEQ ID NO: 58539 - DNA, 15 bp, Homo sapiens
agtgttcttctccac

SEQ ID NO: 58540 - DNA, 15 bp, Homo sapiens
gtgttcttctccacc

SEQ ID NO: 58541 - DNA, 15 bp, Homo sapiens
tgttcttctccaccg

SEQ ID NO: 58542 - DNA, 15 bp, Homo sapiens
gttcttctccaccgc

SEQ ID NO: 58543 - DNA, 15 bp, Homo sapiens
ttcttctccaccgcc

SEQ ID NO: 58544 - DNA, 15 bp, Homo sapiens
tcttctccaccgcct

SEQ ID NO: 58545 - DNA, 15 bp, Homo sapiens
cttctccaccgcctc

SEQ ID NO: 58546 - DNA, 15 bp, Homo sapiens
ttctccaccgcctcc

SEQ ID NO: 58547 - DNA, 15 bp, Homo sapiens
tctccaccgcctcca

SEQ ID NO: 58548 - DNA, 15 bp, Homo sapiens
ctccaccgcctccag

SEQ ID NO: 58549 - DNA, 15 bp, Homo sapiens
tccaccgcctccagc

SEQ ID NO: 58550 - DNA, 15 bp, Homo sapiens
ccaccgcctccagcc

SEQ ID NO: 58551 - DNA, 15 bp, Homo sapiens
caccgcctccagccg

SEQ ID NO: 58552 - DNA, 15 bp, Homo sapiens
accgcctccagccgc

SEQ ID NO: 58553 - DNA, 15 bp, Homo sapiens
ccgcctccagccgcc

SEQ ID NO: 58554 - DNA, 15 bp, Homo sapiens
cgcctccagccgccc

SEQ ID NO: 58555 - DNA, 15 bp, Homo sapiens
gcctccagccgccca

SEQ ID NO: 58556 - DNA, 15 bp, Homo sapiens
cctccagccgcccag

SEQ ID NO: 58557 - DNA, 15 bp, Homo sapiens
ctccagccgcccagg

SEQ ID NO: 58558 - DNA, 15 bp, Homo sapiens
tccagccgcccaggc

SEQ ID NO: 58559 - DNA, 15 bp, Homo sapiens
ccagccgcccaggcc

SEQ ID NO: 58560 - DNA, 15 bp, Homo sapiens
cagccgcccaggccc

SEQ ID NO: 58561 - DNA, 15 bp, Homo sapiens
agccgcccaggcccc

SEQ ID NO: 58562 - DNA, 15 bp, Homo sapiens
gccgcccaggccccc

SEQ ID NO: 58563 - DNA, 15 bp, Homo sapiens
ccgcccaggccccct

SEQ ID NO: 58564 - DNA, 15 bp, Homo sapiens
cgcccaggccccctc

SEQ ID NO: 58565 - DNA, 15 bp, Homo sapiens
gcccaggccccctcg

SEQ ID NO: 58566 - DNA, 15 bp, Homo sapiens
cccaggccccctcgc

SEQ ID NO: 58567 - DNA, 15 bp, Homo sapiens
ccaggccccctcgcc

SEQ ID NO: 58568 - DNA, 15 bp, Homo sapiens
caggccccctcgccc

SEQ ID NO: 58569 - DNA, 15 bp, Homo sapiens
aggccccctcgcccg

SEQ ID NO: 58570 - DNA, 15 bp, Homo sapiens
ggccccctcgcccgg

SEQ ID NO: 58571 - DNA, 15 bp, Homo sapiens
gccccctcgcccggc

SEQ ID NO: 58572 - DNA, 15 bp, Homo sapiens
ccccctcgcccggcc

SEQ ID NO: 58573 - DNA, 15 bp, Homo sapiens
cccctcgcccggccc

SEQ ID NO: 58574 - DNA, 15 bp, Homo sapiens
ccctcgcccggcccg

SEQ ID NO: 58575 - DNA, 15 bp, Homo sapiens
cctcgcccggcccgc

SEQ ID NO: 58576 - DNA, 15 bp, Homo sapiens
ctcgcccggcccgct

SEQ ID NO: 58577 - DNA, 15 bp, Homo sapiens
tcgcccggcccgctc

SEQ ID NO: 58578 - DNA, 15 bp, Homo sapiens
cgcccggcccgctct

SEQ ID NO: 58579 - DNA, 15 bp, Homo sapiens
gcccggcccgctctc

SEQ ID NO: 58580 - DNA, 15 bp, Homo sapiens
cccggcccgctctct

SEQ ID NO: 58581 - DNA, 15 bp, Homo sapiens
ccggcccgctctctg

SEQ ID NO: 58582 - DNA, 15 bp, Homo sapiens
cggcccgctctctgg

SEQ ID NO: 58583 - DNA, 15 bp, Homo sapiens
ggcccgctctctggc

SEQ ID NO: 58584 - DNA, 15 bp, Homo sapiens
gcccgctctctggct

SEQ ID NO: 58585 - DNA, 15 bp, Homo sapiens
cccgctctctggctc

SEQ ID NO: 58586 - DNA, 15 bp, Homo sapiens
ccgctctctggctct

SEQ ID NO: 58587 - DNA, 15 bp, Homo sapiens
cgctctctggctctt

SEQ ID NO: 58588 - DNA, 15 bp, Homo sapiens
gctctctggctcttc

SEQ ID NO: 58589 - DNA, 15 bp, Homo sapiens
ctctctggctcttcg

SEQ ID NO: 58590 - DNA, 15 bp, Homo sapiens
tctctggctcttcgg

SEQ ID NO: 58591 - DNA, 15 bp, Homo sapiens
ctctggctcttcggt

SEQ ID NO: 58592 - DNA, 15 bp, Homo sapiens
tctggctcttcggtc

SEQ ID NO: 58593 - DNA, 15 bp, Homo sapiens
ctggctcttcggtcc

SEQ ID NO: 58594 - DNA, 15 bp, Homo sapiens
tggctcttcggtccg

SEQ ID NO: 58595 - DNA, 15 bp, Homo sapiens
ggctcttcggtccgg

SEQ ID NO: 58596 - DNA, 15 bp, Homo sapiens
gctcttcggtccgga

SEQ ID NO: 58597 - DNA, 15 bp, Homo sapiens
ctcttcggtccggaa

SEQ ID NO: 58598 - DNA, 15 bp, Homo sapiens
tcttcggtccggaaa

SEQ ID NO: 58599 - DNA, 15 bp, Homo sapiens
cttcggtccggaaag

SEQ ID NO: 58600 - DNA, 15 bp, Homo sapiens
ttcggtccggaaagg

SEQ ID NO: 58601 - DNA, 15 bp, Homo sapiens
tcggtccggaaagga

SEQ ID NO: 58602 - DNA, 15 bp, Homo sapiens
cggtccggaaaggac

SEQ ID NO: 58603 - DNA, 15 bp, Homo sapiens
ggtccggaaaggacc

SEQ ID NO: 58604 - DNA, 15 bp, Homo sapiens
gtccggaaaggacct

SEQ ID NO: 58605 - DNA, 15 bp, Homo sapiens
tccggaaaggacctt

SEQ ID NO: 58606 - DNA, 15 bp, Homo sapiens
ccggaaaggaccttc

SEQ ID NO: 58607 - DNA, 15 bp, Homo sapiens
cggaaaggaccttct

SEQ ID NO: 58608 - DNA, 15 bp, Homo sapiens
ggaaaggaccttcta

SEQ ID NO: 58609 - DNA, 15 bp, Homo sapiens
gaaaggaccttctac

SEQ ID NO: 58610 - DNA, 15 bp, Homo sapiens
aaaggaccttctact

SEQ ID NO: 58611 - DNA, 15 bp, Homo sapiens
aaggaccttctactc

SEQ ID NO: 58612 - DNA, 15 bp, Homo sapiens
aggaccttctactcc

SEQ ID NO: 58613 - DNA, 15 bp, Homo sapiens
ggaccttctactccc

SEQ ID NO: 58614 - DNA, 15 bp, Homo sapiens
gaccttctactccca

SEQ ID NO: 58615 - DNA, 15 bp, Homo sapiens
accttctactcccag

SEQ ID NO: 58616 - DNA, 15 bp, Homo sapiens
ccttctactcccagg

SEQ ID NO: 58617 - DNA, 15 bp, Homo sapiens
cttctactcccaggc

SEQ ID NO: 58618 - DNA, 15 bp, Homo sapiens
ttctactcccaggcg

SEQ ID NO: 58619 - DNA, 15 bp, Homo sapiens
tctactcccaggcgg

SEQ ID NO: 58620 - DNA, 15 bp, Homo sapiens
ctactcccaggcgga

SEQ ID NO: 58621 - DNA, 15 bp, Homo sapiens
tactcccaggcggag

SEQ ID NO: 58622 - DNA, 15 bp, Homo sapiens
actcccaggcggagg

SEQ ID NO: 58623 - DNA, 15 bp, Homo sapiens
ctcccaggcggaggc

SEQ ID NO: 58624 - DNA, 15 bp, Homo sapiens
tcccaggcggaggct

SEQ ID NO: 58625 - DNA, 15 bp, Homo sapiens
cccaggcggaggctc

SEQ ID NO: 58626 - DNA, 15 bp, Homo sapiens
ccaggcggaggctcc

SEQ ID NO: 58627 - DNA, 15 bp, Homo sapiens
caggcggaggctccc

SEQ ID NO: 58628 - DNA, 15 bp, Homo sapiens
aggcggaggctcccc

SEQ ID NO: 58629 - DNA, 15 bp, Homo sapiens
ggcggaggctcccct

SEQ ID NO: 58630 - DNA, 15 bp, Homo sapiens
gcggaggctcccctt

SEQ ID NO: 58631 - DNA, 15 bp, Homo sapiens
cggaggctccccttt

SEQ ID NO: 58632 - DNA, 15 bp, Homo sapiens
ggaggctcccctttc

SEQ ID NO: 58633 - DNA, 15 bp, Homo sapiens
gaggctcccctttcc

SEQ ID NO: 58634 - DNA, 15 bp, Homo sapiens
aggctcccctttccc

SEQ ID NO: 58635 - DNA, 15 bp, Homo sapiens
ggctcccctttccct

SEQ ID NO: 58636 - DNA, 15 bp, Homo sapiens
gctcccctttccctg

SEQ ID NO: 58637 - DNA, 15 bp, Homo sapiens
ctcccctttccctga

SEQ ID NO: 58638 - DNA, 15 bp, Homo sapiens
tcccctttccctgag

SEQ ID NO: 58639 - DNA, 15 bp, Homo sapiens
cccctttccctgagt

SEQ ID NO: 58640 - DNA, 15 bp, Homo sapiens
ccctttccctgagtt

SEQ ID NO: 58641 - DNA, 15 bp, Homo sapiens
cctttccctgagtta

SEQ ID NO: 58642 - DNA, 15 bp, Homo sapiens
ctttccctgagttac

SEQ ID NO: 58643 - DNA, 15 bp, Homo sapiens
tttccctgagttacc

SEQ ID NO: 58644 - DNA, 15 bp, Homo sapiens
ttccctgagttaccc

SEQ ID NO: 58645 - DNA, 15 bp, Homo sapiens
tccctgagttacccc

SEQ ID NO: 58646 - DNA, 15 bp, Homo sapiens
ccctgagttaccccg

SEQ ID NO: 58647 - DNA, 15 bp, Homo sapiens
cctgagttaccccga

SEQ ID NO: 58648 - DNA, 15 bp, Homo sapiens
ctgagttaccccgac

SEQ ID NO: 58649 - DNA, 15 bp, Homo sapiens
tgagttaccccgact

SEQ ID NO: 58650 - DNA, 15 bp, Homo sapiens
gagttaccccgactg

SEQ ID NO: 58651 - DNA, 15 bp, Homo sapiens
agttaccccgactga

SEQ ID NO: 58652 - DNA, 15 bp, Homo sapiens
gttaccccgactgac

SEQ ID NO: 58653 - DNA, 15 bp, Homo sapiens
ttaccccgactgact

SEQ ID NO: 58654 - DNA, 15 bp, Homo sapiens
taccccgactgactc

SEQ ID NO: 58655 - DNA, 15 bp, Homo sapiens
accccgactgactcg

SEQ ID NO: 58656 - DNA, 15 bp, Homo sapiens
ccccgactgactcgg

SEQ ID NO: 58657 - DNA, 15 bp, Homo sapiens
cccgactgactcgga

SEQ ID NO: 58658 - DNA, 15 bp, Homo sapiens
ccgactgactcggac

SEQ ID NO: 58659 - DNA, 15 bp, Homo sapiens
cgactgactcggacc

SEQ ID NO: 58660 - DNA, 15 bp, Homo sapiens
gactgactcggacct

SEQ ID NO: 58661 - DNA, 15 bp, Homo sapiens
actgactcggacctg

SEQ ID NO: 58662 - DNA, 15 bp, Homo sapiens
ctgactcggacctgg

SEQ ID NO: 58663 - DNA, 15 bp, Homo sapiens
tgactcggacctggg

SEQ ID NO: 58664 - DNA, 15 bp, Homo sapiens
gactcggacctgggc

SEQ ID NO: 58665 - DNA, 15 bp, Homo sapiens
actcggacctgggct

SEQ ID NO: 58666 - DNA, 15 bp, Homo sapiens
ctcggacctgggctc

SEQ ID NO: 58667 - DNA, 15 bp, Homo sapiens
tcggacctgggctca

SEQ ID NO: 58668 - DNA, 15 bp, Homo sapiens
cggacctgggctcag

SEQ ID NO: 58669 - DNA, 15 bp, Homo sapiens
ggacctgggctcagt

SEQ ID NO: 58670 - DNA, 15 bp, Homo sapiens
gacctgggctcagtg

SEQ ID NO: 58671 - DNA, 15 bp, Homo sapiens
acctgggctcagtga

SEQ ID NO: 58672 - DNA, 15 bp, Homo sapiens
cctgggctcagtgag

SEQ ID NO: 58673 - DNA, 15 bp, Homo sapiens
ctgggctcagtgagg

SEQ ID NO: 58674 - DNA, 15 bp, Homo sapiens
tgggctcagtgaggc

SEQ ID NO: 58675 - DNA, 15 bp, Homo sapiens
gggctcagtgaggca

SEQ ID NO: 58676 - DNA, 15 bp, Homo sapiens
ggctcagtgaggcat

SEQ ID NO: 58677 - DNA, 15 bp, Homo sapiens
gctcagtgaggcatc

SEQ ID NO: 58678 - DNA, 15 bp, Homo sapiens
ctcagtgaggcatcc

SEQ ID NO: 58679 - DNA, 15 bp, Homo sapiens
tcagtgaggcatccg

SEQ ID NO: 58680 - DNA, 15 bp, Homo sapiens
cagtgaggcatccgg

SEQ ID NO: 58681 - DNA, 15 bp, Homo sapiens
agtgaggcatccggc

SEQ ID NO: 58682 - DNA, 15 bp, Homo sapiens
gtgaggcatccggcc

SEQ ID NO: 58683 - DNA, 15 bp, Homo sapiens
tgaggcatccggccc

SEQ ID NO: 58684 - DNA, 15 bp, Homo sapiens
gaggcatccggcccg

SEQ ID NO: 58685 - DNA, 15 bp, Homo sapiens
aggcatccggcccgg

SEQ ID NO: 58686 - DNA, 15 bp, Homo sapiens
ggcatccggcccggc

SEQ ID NO: 58687 - DNA, 15 bp, Homo sapiens
gcatccggcccggct

SEQ ID NO: 58688 - DNA, 15 bp, Homo sapiens
catccggcccggctg

SEQ ID NO: 58689 - DNA, 15 bp, Homo sapiens
atccggcccggctgg

SEQ ID NO: 58690 - DNA, 15 bp, Homo sapiens
tccggcccggctggg

SEQ ID NO: 58691 - DNA, 15 bp, Homo sapiens
ccggcccggctgggg

SEQ ID NO: 58692 - DNA, 15 bp, Homo sapiens
cggcccggctgggga

SEQ ID NO: 58693 - DNA, 15 bp, Homo sapiens
ggcccggctggggag

SEQ ID NO: 58694 - DNA, 15 bp, Homo sapiens
gcccggctggggagc

SEQ ID NO: 58695 - DNA, 15 bp, Homo sapiens
cccggctggggagcg

SEQ ID NO: 58696 - DNA, 15 bp, Homo sapiens
ccggctggggagcgg

SEQ ID NO: 58697 - DNA, 15 bp, Homo sapiens
cggctggggagcgga

SEQ ID NO: 58698 - DNA, 15 bp, Homo sapiens
ggctggggagcggag

SEQ ID NO: 58699 - DNA, 15 bp, Homo sapiens
gctggggagcggagc

SEQ ID NO: 58700 - DNA, 15 bp, Homo sapiens
ctggggagcggagcg

SEQ ID NO: 58701 - DNA, 15 bp, Homo sapiens
tggggagcggagcgc

SEQ ID NO: 58702 - DNA, 15 bp, Homo sapiens
ggggagcggagcgcg

SEQ ID NO: 58703 - DNA, 15 bp, Homo sapiens
gggagcggagcgcgg

SEQ ID NO: 58704 - DNA, 15 bp, Homo sapiens
ggagcggagcgcggt

SEQ ID NO: 58705 - DNA, 15 bp, Homo sapiens
gagcggagcgcggtc

SEQ ID NO: 58706 - DNA, 15 bp, Homo sapiens
agcggagcgcggtct

SEQ ID NO: 58707 - DNA, 15 bp, Homo sapiens
gcggagcgcggtctc

SEQ ID NO: 58708 - DNA, 15 bp, Homo sapiens
cggagcgcggtctcg

SEQ ID NO: 58709 - DNA, 15 bp, Homo sapiens
ggagcgcggtctcgg

SEQ ID NO: 58710 - DNA, 15 bp, Homo sapiens
gagcgcggtctcggc

SEQ ID NO: 58711 - DNA, 15 bp, Homo sapiens
agcgcggtctcggca

SEQ ID NO: 58712 - DNA, 15 bp, Homo sapiens
gcgcggtctcggcag

SEQ ID NO: 58713 - DNA, 15 bp, Homo sapiens
cgcggtctcggcagc

SEQ ID NO: 58714 - DNA, 15 bp, Homo sapiens
gcggtctcggcagct

SEQ ID NO: 58715 - DNA, 15 bp, Homo sapiens
cggtctcggcagctc

SEQ ID NO: 58716 - DNA, 15 bp, Homo sapiens
ggtctcggcagctcc

SEQ ID NO: 58717 - DNA, 15 bp, Homo sapiens
gtctcggcagctccc

SEQ ID NO: 58718 - DNA, 15 bp, Homo sapiens
tctcggcagctcccc

SEQ ID NO: 58719 - DNA, 15 bp, Homo sapiens
ctcggcagctcccct

SEQ ID NO: 58720 - DNA, 15 bp, Homo sapiens
tcggcagctcccctt

SEQ ID NO: 58721 - DNA, 15 bp, Homo sapiens
cggcagctccccttc

SEQ ID NO: 58722 - DNA, 15 bp, Homo sapiens
ggcagctccccttcc

SEQ ID NO: 58723 - DNA, 15 bp, Homo sapiens
gcagctccccttccc

SEQ ID NO: 58724 - DNA, 15 bp, Homo sapiens
cagctccccttccct

SEQ ID NO: 58725 - DNA, 15 bp, Homo sapiens
agctccccttccctt

SEQ ID NO: 58726 - DNA, 15 bp, Homo sapiens
gctccccttcccttg

SEQ ID NO: 58727 - DNA, 15 bp, Homo sapiens
ctccccttcccttga

SEQ ID NO: 58728 - DNA, 15 bp, Homo sapiens
tccccttcccttgag

SEQ ID NO: 58729 - DNA, 15 bp, Homo sapiens
ccccttcccttgaga

SEQ ID NO: 58730 - DNA, 15 bp, Homo sapiens
cccttcccttgagaa

SEQ ID NO: 58731 - DNA, 15 bp, Homo sapiens
ccttcccttgagaaa

SEQ ID NO: 58732 - DNA, 15 bp, Homo sapiens
cttcccttgagaaag

SEQ ID NO: 58733 - DNA, 15 bp, Homo sapiens
ttcccttgagaaagc

SEQ ID NO: 58734 - DNA, 15 bp, Homo sapiens
tcccttgagaaagcg

SEQ ID NO: 58735 - DNA, 15 bp, Homo sapiens
cccttgagaaagcgg

SEQ ID NO: 58736 - DNA, 15 bp, Homo sapiens
ccttgagaaagcggg

SEQ ID NO: 58737 - DNA, 15 bp, Homo sapiens
cttgagaaagcggga

SEQ ID NO: 58738 - DNA, 15 bp, Homo sapiens
ttgagaaagcgggaa

SEQ ID NO: 58739 - DNA, 15 bp, Homo sapiens
tgagaaagcgggaac

SEQ ID NO: 58740 - DNA, 15 bp, Homo sapiens
gagaaagcgggaacc

SEQ ID NO: 58741 - DNA, 15 bp, Homo sapiens
agaaagcgggaaccc

SEQ ID NO: 58742 - DNA, 15 bp, Homo sapiens
gaaagcgggaaccct

SEQ ID NO: 58743 - DNA, 15 bp, Homo sapiens
aaagcgggaaccctc

SEQ ID NO: 58744 - DNA, 15 bp, Homo sapiens
aagcgggaaccctct

SEQ ID NO: 58745 - DNA, 15 bp, Homo sapiens
agcgggaaccctcta

SEQ ID NO: 58746 - DNA, 15 bp, Homo sapiens
gcgggaaccctctaa

SEQ ID NO: 58747 - DNA, 15 bp, Homo sapiens
cgggaaccctctaag

SEQ ID NO: 58748 - DNA, 15 bp, Homo sapiens
gggaaccctctaagc

SEQ ID NO: 58749 - DNA, 15 bp, Homo sapiens
ggaaccctctaagcc

SEQ ID NO: 58750 - DNA, 15 bp, Homo sapiens
gaaccctctaagcca

SEQ ID NO: 58751 - DNA, 15 bp, Homo sapiens
aaccctctaagccag

SEQ ID NO: 58752 - DNA, 15 bp, Homo sapiens
accctctaagccagc

SEQ ID NO: 58753 - DNA, 15 bp, Homo sapiens
ccctctaagccagcg

SEQ ID NO: 58754 - DNA, 15 bp, Homo sapiens
cctctaagccagcgc

SEQ ID NO: 58755 - DNA, 15 bp, Homo sapiens
ctctaagccagcgcc

SEQ ID NO: 58756 - DNA, 15 bp, Homo sapiens
tctaagccagcgccc

SEQ ID NO: 58757 - DNA, 15 bp, Homo sapiens
ctaagccagcgcccg

SEQ ID NO: 58758 - DNA, 15 bp, Homo sapiens
taagccagcgcccga

SEQ ID NO: 58759 - DNA, 15 bp, Homo sapiens
aagccagcgcccgaa

SEQ ID NO: 58760 - DNA, 15 bp, Homo sapiens
agccagcgcccgaaa

SEQ ID NO: 58761 - DNA, 15 bp, Homo sapiens
gccagcgcccgaaac

SEQ ID NO: 58762 - DNA, 15 bp, Homo sapiens
ccagcgcccgaaact

SEQ ID NO: 58763 - DNA, 15 bp, Homo sapiens
cagcgcccgaaactc

SEQ ID NO: 58764 - DNA, 15 bp, Homo sapiens
agcgcccgaaactcg

SEQ ID NO: 58765 - DNA, 15 bp, Homo sapiens
gcgcccgaaactcgc

SEQ ID NO: 58766 - DNA, 15 bp, Homo sapiens
cgcccgaaactcgcg

SEQ ID NO: 58767 - DNA, 15 bp, Homo sapiens
gcccgaaactcgcgg

SEQ ID NO: 58768 - DNA, 15 bp, Homo sapiens
cccgaaactcgcggg

SEQ ID NO: 58769 - DNA, 15 bp, Homo sapiens
ccgaaactcgcgggg

SEQ ID NO: 58770 - DNA, 15 bp, Homo sapiens
cgaaactcgcgggga

SEQ ID NO: 58771 - DNA, 15 bp, Homo sapiens
gaaactcgcggggag

SEQ ID NO: 58772 - DNA, 15 bp, Homo sapiens
aaactcgcggggagg

SEQ ID NO: 58773 - DNA, 15 bp, Homo sapiens
aactcgcggggaggg

SEQ ID NO: 58774 - DNA, 15 bp, Homo sapiens
actcgcggggaggga

SEQ ID NO: 58775 - DNA, 15 bp, Homo sapiens
ctcgcggggagggag

SEQ ID NO: 58776 - DNA, 15 bp, Homo sapiens
tcgcggggagggagg

SEQ ID NO: 58777 - DNA, 15 bp, Homo sapiens
cgcggggagggagga

SEQ ID NO: 58778 - DNA, 15 bp, Homo sapiens
gcggggagggaggac

SEQ ID NO: 58779 - DNA, 15 bp, Homo sapiens
cggggagggaggaca

SEQ ID NO: 58780 - DNA, 15 bp, Homo sapiens
ggggagggaggacag

SEQ ID NO: 58781 - DNA, 15 bp, Homo sapiens
gggagggaggacaga

SEQ ID NO: 58782 - DNA, 15 bp, Homo sapiens
ggagggaggacagaa

SEQ ID NO: 58783 - DNA, 15 bp, Homo sapiens
gagggaggacagaag

SEQ ID NO: 58784 - DNA, 15 bp, Homo sapiens
agggaggacagaagg

SEQ ID NO: 58785 - DNA, 15 bp, Homo sapiens
gggaggacagaaggg

SEQ ID NO: 58786 - DNA, 15 bp, Homo sapiens
ggaggacagaaggga

SEQ ID NO: 58787 - DNA, 15 bp, Homo sapiens
gaggacagaagggaa

SEQ ID NO: 58788 - DNA, 15 bp, Homo sapiens
aggacagaagggaaa

SEQ ID NO: 58789 - DNA, 15 bp, Homo sapiens
ggacagaagggaaaa

SEQ ID NO: 58790 - DNA, 15 bp, Homo sapiens
gacagaagggaaaaa

SEQ ID NO: 58791 - DNA, 15 bp, Homo sapiens
acagaagggaaaaaa

SEQ ID NO: 58792 - DNA, 15 bp, Homo sapiens
cagaagggaaaaaaa

SEQ ID NO: 58793 - DNA, 15 bp, Homo sapiens
agaagggaaaaaaaa

SEQ ID NO: 58794 - DNA, 15 bp, Homo sapiens
gaagggaaaaaaaaa

SEQ ID NO: 58795 - DNA, 15 bp, Homo sapiens
aagggaaaaaaaaaa

SEQ ID NO: 58796 - DNA, 15 bp, Homo sapiens
agggaaaaaaaaaag

SEQ ID NO: 58797 - DNA, 15 bp, Homo sapiens
gggaaaaaaaaaaga

SEQ ID NO: 58798 - DNA, 15 bp, Homo sapiens
ggaaaaaaaaaagaa

SEQ ID NO: 58799 - DNA, 15 bp, Homo sapiens
gaaaaaaaaaagaaa

SEQ ID NO: 58800 - DNA, 15 bp, Homo sapiens
aaaaaaaaagaaaac

SEQ ID NO: 58801 - DNA, 15 bp, Homo sapiens
aaaaaaaagaaaacc

SEQ ID NO: 58802 - DNA, 15 bp, Homo sapiens
aaaaaaagaaaaccc

SEQ ID NO: 58803 - DNA, 15 bp, Homo sapiens
aaaaaagaaaaccca

SEQ ID NO: 58804 - DNA, 15 bp, Homo sapiens
aaaaagaaaacccag

SEQ ID NO: 58805 - DNA, 15 bp, Homo sapiens
aaaagaaaacccaga

SEQ ID NO: 58806 - DNA, 15 bp, Homo sapiens
aaagaaaacccagaa

SEQ ID NO: 58807 - DNA, 15 bp, Homo sapiens
aagaaaacccagaaa

SEQ ID NO: 58808 - DNA, 15 bp, Homo sapiens
agaaaacccagaaag

SEQ ID NO: 58809 - DNA, 15 bp, Homo sapiens
gaaaacccagaaaga

SEQ ID NO: 58810 - DNA, 15 bp, Homo sapiens
aaaacccagaaagaa

SEQ ID NO: 58811 - DNA, 15 bp, Homo sapiens
aaacccagaaagaag

SEQ ID NO: 58812 - DNA, 15 bp, Homo sapiens
aacccagaaagaagc

SEQ ID NO: 58813 - DNA, 15 bp, Homo sapiens
acccagaaagaagca

SEQ ID NO: 58814 - DNA, 15 bp, Homo sapiens
cccagaaagaagcat

SEQ ID NO: 58815 - DNA, 15 bp, Homo sapiens
ccagaaagaagcatc

SEQ ID NO: 58816 - DNA, 15 bp, Homo sapiens
cagaaagaagcatcc

SEQ ID NO: 58817 - DNA, 15 bp, Homo sapiens
agaaagaagcatcca

SEQ ID NO: 58818 - DNA, 15 bp, Homo sapiens
gaaagaagcatccag

SEQ ID NO: 58819 - DNA, 15 bp, Homo sapiens
aaagaagcatccagc

SEQ ID NO: 58820 - DNA, 15 bp, Homo sapiens
aagaagcatccagcg

SEQ ID NO: 58821 - DNA, 15 bp, Homo sapiens
agaagcatccagcga

SEQ ID NO: 58822 - DNA, 15 bp, Homo sapiens
gaagcatccagcgag

SEQ ID NO: 58823 - DNA, 15 bp, Homo sapiens
aagcatccagcgagg

SEQ ID NO: 58824 - DNA, 15 bp, Homo sapiens
agcatccagcgagga

SEQ ID NO: 58825 - DNA, 15 bp, Homo sapiens
gcatccagcgaggag

SEQ ID NO: 58826 - DNA, 15 bp, Homo sapiens
catccagcgaggagc

SEQ ID NO: 58827 - DNA, 15 bp, Homo sapiens
atccagcgaggagcg

SEQ ID NO: 58828 - DNA, 15 bp, Homo sapiens
tccagcgaggagcga

SEQ ID NO: 58829 - DNA, 15 bp, Homo sapiens
ccagcgaggagcgag

SEQ ID NO: 58830 - DNA, 15 bp, Homo sapiens
cagcgaggagcgagg

SEQ ID NO: 58831 - DNA, 15 bp, Homo sapiens
agcgaggagcgaggg

SEQ ID NO: 58832 - DNA, 15 bp, Homo sapiens
gcgaggagcgagggc

SEQ ID NO: 58833 - DNA, 15 bp, Homo sapiens
cgaggagcgagggcg

SEQ ID NO: 58834 - DNA, 15 bp, Homo sapiens
gaggagcgagggcga

SEQ ID NO: 58835 - DNA, 15 bp, Homo sapiens
aggagcgagggcgac

SEQ ID NO: 58836 - DNA, 15 bp, Homo sapiens
ggagcgagggcgacg

SEQ ID NO: 58837 - DNA, 15 bp, Homo sapiens
gagcgagggcgacgg

SEQ ID NO: 58838 - DNA, 15 bp, Homo sapiens
agcgagggcgacgga

SEQ ID NO: 58839 - DNA, 15 bp, Homo sapiens
gcgagggcgacggag

SEQ ID NO: 58840 - DNA, 15 bp, Homo sapiens
cgagggcgacggaga

SEQ ID NO: 58841 - DNA, 15 bp, Homo sapiens
gagggcgacggagag

SEQ ID NO: 58842 - DNA, 15 bp, Homo sapiens
agggcgacggagagg

SEQ ID NO: 58843 - DNA, 15 bp, Homo sapiens
gggcgacggagagga

SEQ ID NO: 58844 - DNA, 15 bp, Homo sapiens
ggcgacggagaggaa

SEQ ID NO: 58845 - DNA, 15 bp, Homo sapiens
gcgacggagaggaag

SEQ ID NO: 58846 - DNA, 15 bp, Homo sapiens
cgacggagaggaaga

SEQ ID NO: 58847 - DNA, 15 bp, Homo sapiens
gacggagaggaagag

SEQ ID NO: 58848 - DNA, 15 bp, Homo sapiens
acggagaggaagaga

SEQ ID NO: 58849 - DNA, 15 bp, Homo sapiens
cggagaggaagagat

SEQ ID NO: 58850 - DNA, 15 bp, Homo sapiens
ggagaggaagagata

SEQ ID NO: 58851 - DNA, 15 bp, Homo sapiens
gagaggaagagatag

SEQ ID NO: 58852 - DNA, 15 bp, Homo sapiens
agaggaagagataga

SEQ ID NO: 58853 - DNA, 15 bp, Homo sapiens
gaggaagagatagaa

SEQ ID NO: 58854 - DNA, 15 bp, Homo sapiens
aggaagagatagaat

SEQ ID NO: 58855 - DNA, 15 bp, Homo sapiens
ggaagagatagaatg

SEQ ID NO: 58856 - DNA, 15 bp, Homo sapiens
gaagagatagaatga

SEQ ID NO: 58857 - DNA, 15 bp, Homo sapiens
aagagatagaatgag

SEQ ID NO: 58858 - DNA, 15 bp, Homo sapiens
agagatagaatgagg

SEQ ID NO: 58859 - DNA, 15 bp, Homo sapiens
gagatagaatgaggg

SEQ ID NO: 58860 - DNA, 15 bp, Homo sapiens
agatagaatgaggga

SEQ ID NO: 58861 - DNA, 15 bp, Homo sapiens
gatagaatgagggag

SEQ ID NO: 58862 - DNA, 15 bp, Homo sapiens
atagaatgagggagg

SEQ ID NO: 58863 - DNA, 15 bp, Homo sapiens
tagaatgagggaggg

SEQ ID NO: 58864 - DNA, 15 bp, Homo sapiens
agaatgagggaggga

SEQ ID NO: 58865 - DNA, 15 bp, Homo sapiens
gaatgagggagggat

SEQ ID NO: 58866 - DNA, 15 bp, Homo sapiens
aatgagggagggatg

SEQ ID NO: 58867 - DNA, 15 bp, Homo sapiens
atgagggagggatgg

SEQ ID NO: 58868 - DNA, 15 bp, Homo sapiens
tgagggagggatgga

SEQ ID NO: 58869 - DNA, 15 bp, Homo sapiens
gagggagggatggag

SEQ ID NO: 58870 - DNA, 15 bp, Homo sapiens
agggagggatggagg

SEQ ID NO: 58871 - DNA, 15 bp, Homo sapiens
gggagggatggaggc

SEQ ID NO: 58872 - DNA, 15 bp, Homo sapiens
ggagggatggaggct

SEQ ID NO: 58873 - DNA, 15 bp, Homo sapiens
gagggatggaggctg

SEQ ID NO: 58874 - DNA, 15 bp, Homo sapiens
agggatggaggctgg

SEQ ID NO: 58875 - DNA, 15 bp, Homo sapiens
gggatggaggctgga

SEQ ID NO: 58876 - DNA, 15 bp, Homo sapiens
ggatggaggctggag

SEQ ID NO: 58877 - DNA, 15 bp, Homo sapiens
gatggaggctggagg

SEQ ID NO: 58878 - DNA, 15 bp, Homo sapiens
atggaggctggagga

SEQ ID NO: 58879 - DNA, 15 bp, Homo sapiens
tggaggctggaggag

SEQ ID NO: 58880 - DNA, 15 bp, Homo sapiens
ggaggctggaggagg

SEQ ID NO: 58881 - DNA, 15 bp, Homo sapiens
gaggctggaggaggg

SEQ ID NO: 58882 - DNA, 15 bp, Homo sapiens
aggctggaggagggg

SEQ ID NO: 58883 - DNA, 15 bp, Homo sapiens
ggctggaggaggggg

SEQ ID NO: 58884 - DNA, 15 bp, Homo sapiens
gctggaggagggggc

SEQ ID NO: 58885 - DNA, 15 bp, Homo sapiens
ctggaggagggggcg

SEQ ID NO: 58886 - DNA, 15 bp, Homo sapiens
tggaggagggggcgg

SEQ ID NO: 58887 - DNA, 15 bp, Homo sapiens
ggaggagggggcggg

SEQ ID NO: 58888 - DNA, 15 bp, Homo sapiens
gaggagggggcgggg

SEQ ID NO: 58889 - DNA, 15 bp, Homo sapiens
aggagggggcggggt

SEQ ID NO: 58890 - DNA, 15 bp, Homo sapiens
ggagggggcggggtg

SEQ ID NO: 58891 - DNA, 15 bp, Homo sapiens
gagggggcggggtgg

SEQ ID NO: 58892 - DNA, 15 bp, Homo sapiens
agggggcggggtgga

SEQ ID NO: 58893 - DNA, 15 bp, Homo sapiens
gggggcggggtggaa

SEQ ID NO: 58894 - DNA, 15 bp, Homo sapiens
ggggcggggtggaag

SEQ ID NO: 58895 - DNA, 15 bp, Homo sapiens
gggcggggtggaaga

SEQ ID NO: 58896 - DNA, 15 bp, Homo sapiens
ggcggggtggaagaa

SEQ ID NO: 58897 - DNA, 15 bp, Homo sapiens
gcggggtggaagaag

SEQ ID NO: 58898 - DNA, 15 bp, Homo sapiens
cggggtggaagaagg

SEQ ID NO: 58899 - DNA, 15 bp, Homo sapiens
ggggtggaagaaggg

SEQ ID NO: 58900 - DNA, 15 bp, Homo sapiens
gggtggaagaagggg

SEQ ID NO: 58901 - DNA, 15 bp, Homo sapiens
ggtggaagaaggggg

SEQ ID NO: 58902 - DNA, 15 bp, Homo sapiens
gtggaagaagggggg

SEQ ID NO: 58903 - DNA, 15 bp, Homo sapiens
tggaagaaggggggc

SEQ ID NO: 58904 - DNA, 15 bp, Homo sapiens
ggaagaaggggggcg

SEQ ID NO: 58905 - DNA, 15 bp, Homo sapiens
gaagaaggggggcgg

SEQ ID NO: 58906 - DNA, 15 bp, Homo sapiens
aagaaggggggcggg

SEQ ID NO: 58907 - DNA, 15 bp, Homo sapiens
agaaggggggcggga

SEQ ID NO: 58908 - DNA, 15 bp, Homo sapiens
gaaggggggcgggaa

SEQ ID NO: 58909 - DNA, 15 bp, Homo sapiens
aaggggggcgggaag

SEQ ID NO: 58910 - DNA, 15 bp, Homo sapiens
aggggggcgggaagg

SEQ ID NO: 58911 - DNA, 15 bp, Homo sapiens
ggggggcgggaagga

SEQ ID NO: 58912 - DNA, 15 bp, Homo sapiens
gggggcgggaaggag

SEQ ID NO: 58913 - DNA, 15 bp, Homo sapiens
ggggcgggaaggagg

SEQ ID NO: 58914 - DNA, 15 bp, Homo sapiens
gggcgggaaggaggg

SEQ ID NO: 58915 - DNA, 15 bp, Homo sapiens
ggcgggaaggaggga

SEQ ID NO: 58916 - DNA, 15 bp, Homo sapiens
gcgggaaggagggag

SEQ ID NO: 58917 - DNA, 15 bp, Homo sapiens
cgggaaggagggagg

SEQ ID NO: 58918 - DNA, 15 bp, Homo sapiens
gggaaggagggaggg

SEQ ID NO: 58919 - DNA, 15 bp, Homo sapiens
ggaaggagggaggga

SEQ ID NO: 58920 - DNA, 15 bp, Homo sapiens
gaaggagggagggag

SEQ ID NO: 58921 - DNA, 15 bp, Homo sapiens
aaggagggagggagg

SEQ ID NO: 58922 - DNA, 15 bp, Homo sapiens
aggagggagggaggg

SEQ ID NO: 58923 - DNA, 15 bp, Homo sapiens
ggagggagggagggg

SEQ ID NO: 58924 - DNA, 15 bp, Homo sapiens
gagggagggaggggg

SEQ ID NO: 58925 - DNA, 15 bp, Homo sapiens
agggagggaggggga

SEQ ID NO: 58926 - DNA, 15 bp, Homo sapiens
gggagggagggggaa

SEQ ID NO: 58927 - DNA, 15 bp, Homo sapiens
ggagggagggggaaa

SEQ ID NO: 58928 - DNA, 15 bp, Homo sapiens
gagggagggggaaag

SEQ ID NO: 58929 - DNA, 15 bp, Homo sapiens
agggagggggaaaga

SEQ ID NO: 58930 - DNA, 15 bp, Homo sapiens
gggagggggaaagag

SEQ ID NO: 58931 - DNA, 15 bp, Homo sapiens
ggagggggaaagaga

SEQ ID NO: 58932 - DNA, 15 bp, Homo sapiens
gagggggaaagagag

SEQ ID NO: 58933 - DNA, 15 bp, Homo sapiens
agggggaaagagagg

SEQ ID NO: 58934 - DNA, 15 bp, Homo sapiens
gggggaaagagaggg

SEQ ID NO: 58935 - DNA, 15 bp, Homo sapiens
ggggaaagagaggga

SEQ ID NO: 58936 - DNA, 15 bp, Homo sapiens
gggaaagagagggag

SEQ ID NO: 58937 - DNA, 15 bp, Homo sapiens
ggaaagagagggagg

SEQ ID NO: 58938 - DNA, 15 bp, Homo sapiens
gaaagagagggaggg

SEQ ID NO: 58939 - DNA, 15 bp, Homo sapiens
aaagagagggaggga

SEQ ID NO: 58940 - DNA, 15 bp, Homo sapiens
aagagagggagggag

SEQ ID NO: 58941 - DNA, 15 bp, Homo sapiens
agagagggagggagg

SEQ ID NO: 58942 - DNA, 15 bp, Homo sapiens
gagagggagggaggg

SEQ ID NO: 58943 - DNA, 15 bp, Homo sapiens
agagggagggaggga

SEQ ID NO: 58944 - DNA, 15 bp, Homo sapiens
gagggagggagggat

SEQ ID NO: 58945 - DNA, 15 bp, Homo sapiens
agggagggagggata

SEQ ID NO: 58946 - DNA, 15 bp, Homo sapiens
gggagggagggatac

SEQ ID NO: 58947 - DNA, 15 bp, Homo sapiens
ggagggagggataca

SEQ ID NO: 58948 - DNA, 15 bp, Homo sapiens
gagggagggatacag

SEQ ID NO: 58949 - DNA, 15 bp, Homo sapiens
agggagggatacaga

SEQ ID NO: 58950 - DNA, 15 bp, Homo sapiens
gggagggatacagag

SEQ ID NO: 58951 - DNA, 15 bp, Homo sapiens
ggagggatacagaga

SEQ ID NO: 58952 - DNA, 15 bp, Homo sapiens
gagggatacagagag

SEQ ID NO: 58953 - DNA, 15 bp, Homo sapiens
agggatacagagaga

SEQ ID NO: 58954 - DNA, 15 bp, Homo sapiens
gggatacagagagaa

SEQ ID NO: 58955 - DNA, 15 bp, Homo sapiens
ggatacagagagaat

SEQ ID NO: 58956 - DNA, 15 bp, Homo sapiens
gatacagagagaatg

SEQ ID NO: 58957 - DNA, 15 bp, Homo sapiens
atacagagagaatga

SEQ ID NO: 58958 - DNA, 15 bp, Homo sapiens
tacagagagaatgaa

SEQ ID NO: 58959 - DNA, 15 bp, Homo sapiens
acagagagaatgaat

SEQ ID NO: 58960 - DNA, 15 bp, Homo sapiens
cagagagaatgaatc

SEQ ID NO: 58961 - DNA, 15 bp, Homo sapiens
agagagaatgaatcc

SEQ ID NO: 58962 - DNA, 15 bp, Homo sapiens
gagagaatgaatcct

SEQ ID NO: 58963 - DNA, 15 bp, Homo sapiens
agagaatgaatcctt

SEQ ID NO: 58964 - DNA, 15 bp, Homo sapiens
gagaatgaatccttc

SEQ ID NO: 58965 - DNA, 15 bp, Homo sapiens
agaatgaatccttct

SEQ ID NO: 58966 - DNA, 15 bp, Homo sapiens
gaatgaatccttctc

SEQ ID NO: 58967 - DNA, 15 bp, Homo sapiens
aatgaatccttctca

SEQ ID NO: 58968 - DNA, 15 bp, Homo sapiens
atgaatccttctcac

SEQ ID NO: 58969 - DNA, 15 bp, Homo sapiens
tgaatccttctcact

SEQ ID NO: 58970 - DNA, 15 bp, Homo sapiens
gaatccttctcacta

SEQ ID NO: 58971 - DNA, 15 bp, Homo sapiens
aatccttctcactag

SEQ ID NO: 58972 - DNA, 15 bp, Homo sapiens
atccttctcactaga

SEQ ID NO: 58973 - DNA, 15 bp, Homo sapiens
tccttctcactagaa

SEQ ID NO: 58974 - DNA, 15 bp, Homo sapiens
ccttctcactagaag

SEQ ID NO: 58975 - DNA, 15 bp, Homo sapiens
cttctcactagaaga

SEQ ID NO: 58976 - DNA, 15 bp, Homo sapiens
ttctcactagaagag

SEQ ID NO: 58977 - DNA, 15 bp, Homo sapiens
tctcactagaagagc

SEQ ID NO: 58978 - DNA, 15 bp, Homo sapiens
ctcactagaagagct

SEQ ID NO: 58979 - DNA, 15 bp, Homo sapiens
tcactagaagagctg

SEQ ID NO: 58980 - DNA, 15 bp, Homo sapiens
cactagaagagctga

SEQ ID NO: 58981 - DNA, 15 bp, Homo sapiens
actagaagagctgaa

SEQ ID NO: 58982 - DNA, 15 bp, Homo sapiens
ctagaagagctgaaa

SEQ ID NO: 58983 - DNA, 15 bp, Homo sapiens
tagaagagctgaaat

SEQ ID NO: 58984 - DNA, 15 bp, Homo sapiens
agaagagctgaaatt

SEQ ID NO: 58985 - DNA, 15 bp, Homo sapiens
gaagagctgaaatta

SEQ ID NO: 58986 - DNA, 15 bp, Homo sapiens
aagagctgaaattac

SEQ ID NO: 58987 - DNA, 15 bp, Homo sapiens
agagctgaaattacc

SEQ ID NO: 58988 - DNA, 15 bp, Homo sapiens
gagctgaaattacct

SEQ ID NO: 58989 - DNA, 15 bp, Homo sapiens
agctgaaattacctt

SEQ ID NO: 58990 - DNA, 15 bp, Homo sapiens
gctgaaattaccttg

SEQ ID NO: 58991 - DNA, 15 bp, Homo sapiens
ctgaaattaccttga

SEQ ID NO: 58992 - DNA, 15 bp, Homo sapiens
tgaaattaccttgat

SEQ ID NO: 58993 - DNA, 15 bp, Homo sapiens
gaaattaccttgatt

SEQ ID NO: 58994 - DNA, 15 bp, Homo sapiens
aaattaccttgattc

SEQ ID NO: 58995 - DNA, 15 bp, Homo sapiens
aattaccttgattca

SEQ ID NO: 58996 - DNA, 15 bp, Homo sapiens
attaccttgattcat

SEQ ID NO: 58997 - DNA, 15 bp, Homo sapiens
ttaccttgattcatt

SEQ ID NO: 58998 - DNA, 15 bp, Homo sapiens
taccttgattcattt

SEQ ID NO: 58999 - DNA, 15 bp, Homo sapiens
accttgattcatttt

SEQ ID NO: 59000 - DNA, 15 bp, Homo sapiens
ccttgattcattttt

SEQ ID NO: 59001 - DNA, 15 bp, Homo sapiens
cttgattcatttttt

SEQ ID NO: 59002 - DNA, 15 bp, Homo sapiens
ttgattcattttttt

SEQ ID NO: 59003 - DNA, 15 bp, Homo sapiens
tgattcatttttttg

SEQ ID NO: 59004 - DNA, 15 bp, Homo sapiens
gattcatttttttgt

SEQ ID NO: 59005 - DNA, 15 bp, Homo sapiens
attcatttttttgtg

SEQ ID NO: 59006 - DNA, 15 bp, Homo sapiens
ttcatttttttgtgt

SEQ ID NO: 59007 - DNA, 15 bp, Homo sapiens
tcatttttttgtgtt

SEQ ID NO: 59008 - DNA, 15 bp, Homo sapiens
catttttttgtgttg

SEQ ID NO: 59009 - DNA, 15 bp, Homo sapiens
atttttttgtgttgg

SEQ ID NO: 59010 - DNA, 15 bp, Homo sapiens
tttttttgtgttgga

SEQ ID NO: 59011 - DNA, 15 bp, Homo sapiens
ttttttgtgttggag

SEQ ID NO: 59012 - DNA, 15 bp, Homo sapiens
tttttgtgttggagg

SEQ ID NO: 59013 - DNA, 15 bp, Homo sapiens
ttttgtgttggaggt

SEQ ID NO: 59014 - DNA, 15 bp, Homo sapiens
tttgtgttggaggtt

SEQ ID NO: 59015 - DNA, 15 bp, Homo sapiens
ttgtgttggaggttt

SEQ ID NO: 59016 - DNA, 15 bp, Homo sapiens
tgtgttggaggttta

SEQ ID NO: 59017 - DNA, 15 bp, Homo sapiens
gtgttggaggtttag

SEQ ID NO: 59018 - DNA, 15 bp, Homo sapiens
tgttggaggtttagc

SEQ ID NO: 59019 - DNA, 15 bp, Homo sapiens
gttggaggtttagct

SEQ ID NO: 59020 - DNA, 15 bp, Homo sapiens
ttggaggtttagctt

SEQ ID NO: 59021 - DNA, 15 bp, Homo sapiens
tggaggtttagcttt

SEQ ID NO: 59022 - DNA, 15 bp, Homo sapiens
ggaggtttagcttta

SEQ ID NO: 59023 - DNA, 15 bp, Homo sapiens
gaggtttagctttac

SEQ ID NO: 59024 - DNA, 15 bp, Homo sapiens
aggtttagctttacc

SEQ ID NO: 59025 - DNA, 15 bp, Homo sapiens
ggtttagctttacct

SEQ ID NO: 59026 - DNA, 15 bp, Homo sapiens
gtttagctttacctc

SEQ ID NO: 59027 - DNA, 15 bp, Homo sapiens
tttagctttacctcc

SEQ ID NO: 59028 - DNA, 15 bp, Homo sapiens
ttagctttacctcct

SEQ ID NO: 59029 - DNA, 15 bp, Homo sapiens
tagctttacctcctt

SEQ ID NO: 59030 - DNA, 15 bp, Homo sapiens
agctttacctccttc

SEQ ID NO: 59031 - DNA, 15 bp, Homo sapiens
gctttacctccttcc

SEQ ID NO: 59032 - DNA, 15 bp, Homo sapiens
ctttacctccttccc

SEQ ID NO: 59033 - DNA, 15 bp, Homo sapiens
tttacctccttccct

SEQ ID NO: 59034 - DNA, 15 bp, Homo sapiens
ttacctccttccctc

SEQ ID NO: 59035 - DNA, 15 bp, Homo sapiens
tacctccttccctct

SEQ ID NO: 59036 - DNA, 15 bp, Homo sapiens
acctccttccctctt

SEQ ID NO: 59037 - DNA, 15 bp, Homo sapiens
cctccttccctcttc

SEQ ID NO: 59038 - DNA, 15 bp, Homo sapiens
ctccttccctcttcc

SEQ ID NO: 59039 - DNA, 15 bp, Homo sapiens
tccttccctcttccc

SEQ ID NO: 59040 - DNA, 15 bp, Homo sapiens
ccttccctcttccca

SEQ ID NO: 59041 - DNA, 15 bp, Homo sapiens
cttccctcttcccaa

SEQ ID NO: 59042 - DNA, 15 bp, Homo sapiens
ttccctcttcccaac

SEQ ID NO: 59043 - DNA, 15 bp, Homo sapiens
tccctcttcccaacc

SEQ ID NO: 59044 - DNA, 15 bp, Homo sapiens
ccctcttcccaacct

SEQ ID NO: 59045 - DNA, 15 bp, Homo sapiens
cctcttcccaacctc

SEQ ID NO: 59046 - DNA, 15 bp, Homo sapiens
ctcttcccaacctcc

SEQ ID NO: 59047 - DNA, 15 bp, Homo sapiens
tcttcccaacctcca

SEQ ID NO: 59048 - DNA, 15 bp, Homo sapiens
cttcccaacctccac

SEQ ID NO: 59049 - DNA, 15 bp, Homo sapiens
ttcccaacctccacc

SEQ ID NO: 59050 - DNA, 15 bp, Homo sapiens
tcccaacctccacct

SEQ ID NO: 59051 - DNA, 15 bp, Homo sapiens
cccaacctccacctc

SEQ ID NO: 59052 - DNA, 15 bp, Homo sapiens
ccaacctccacctcc

SEQ ID NO: 59053 - DNA, 15 bp, Homo sapiens
aacctccacctcctc

SEQ ID NO: 59054 - DNA, 15 bp, Homo sapiens
acctccacctcctct

SEQ ID NO: 59055 - DNA, 15 bp, Homo sapiens
cctccacctcctctc

SEQ ID NO: 59056 - DNA, 15 bp, Homo sapiens
ctccacctcctctcc

SEQ ID NO: 59057 - DNA, 15 bp, Homo sapiens
tccacctcctctccc

SEQ ID NO: 59058 - DNA, 15 bp, Homo sapiens
ccacctcctctcccc

SEQ ID NO: 59059 - DNA, 15 bp, Homo sapiens
cacctcctctcccca

SEQ ID NO: 59060 - DNA, 15 bp, Homo sapiens
acctcctctccccac

SEQ ID NO: 59061 - DNA, 15 bp, Homo sapiens
cctcctctccccacc

SEQ ID NO: 59062 - DNA, 15 bp, Homo sapiens
ctcctctccccaccg

SEQ ID NO: 59063 - DNA, 15 bp, Homo sapiens
tcctctccccaccgc

SEQ ID NO: 59064 - DNA, 15 bp, Homo sapiens
cctctccccaccgca

SEQ ID NO: 59065 - DNA, 15 bp, Homo sapiens
ctctccccaccgcac

SEQ ID NO: 59066 - DNA, 15 bp, Homo sapiens
tctccccaccgcaca

SEQ ID NO: 59067 - DNA, 15 bp, Homo sapiens
ctccccaccgcacac

SEQ ID NO: 59068 - DNA, 15 bp, Homo sapiens
tccccaccgcacacc

SEQ ID NO: 59069 - DNA, 15 bp, Homo sapiens
ccccaccgcacacca

SEQ ID NO: 59070 - DNA, 15 bp, Homo sapiens
cccaccgcacaccac

SEQ ID NO: 59071 - DNA, 15 bp, Homo sapiens
ccaccgcacaccacc

SEQ ID NO: 59072 - DNA, 15 bp, Homo sapiens
caccgcacaccacct

SEQ ID NO: 59073 - DNA, 15 bp, Homo sapiens
accgcacaccacctc

SEQ ID NO: 59074 - DNA, 15 bp, Homo sapiens
ccgcacaccacctcc

SEQ ID NO: 59075 - DNA, 15 bp, Homo sapiens
cgcacaccacctcca

SEQ ID NO: 59076 - DNA, 15 bp, Homo sapiens
gcacaccacctccac

SEQ ID NO: 59077 - DNA, 15 bp, Homo sapiens
cacaccacctccacc

SEQ ID NO: 59078 - DNA, 15 bp, Homo sapiens
acaccacctccaccg

SEQ ID NO: 59079 - DNA, 15 bp, Homo sapiens
caccacctccaccgc

SEQ ID NO: 59080 - DNA, 15 bp, Homo sapiens
accacctccaccgcc

SEQ ID NO: 59081 - DNA, 15 bp, Homo sapiens
ccacctccaccgcct

SEQ ID NO: 59082 - DNA, 15 bp, Homo sapiens
cacctccaccgcctg

SEQ ID NO: 59083 - DNA, 15 bp, Homo sapiens
acctccaccgcctga

SEQ ID NO: 59084 - DNA, 15 bp, Homo sapiens
cctccaccgcctgat

SEQ ID NO: 59085 - DNA, 15 bp, Homo sapiens
ctccaccgcctgatt

SEQ ID NO: 59086 - DNA, 15 bp, Homo sapiens
tccaccgcctgattc

SEQ ID NO: 59087 - DNA, 15 bp, Homo sapiens
ccaccgcctgattct

SEQ ID NO: 59088 - DNA, 15 bp, Homo sapiens
caccgcctgattcta

SEQ ID NO: 59089 - DNA, 15 bp, Homo sapiens
accgcctgattctaa

SEQ ID NO: 59090 - DNA, 15 bp, Homo sapiens
ccgcctgattctaaa

SEQ ID NO: 59091 - DNA, 15 bp, Homo sapiens
cgcctgattctaaat

SEQ ID NO: 59092 - DNA, 15 bp, Homo sapiens
gcctgattctaaatg

SEQ ID NO: 59093 - DNA, 15 bp, Homo sapiens
cctgattctaaatgc

SEQ ID NO: 59094 - DNA, 15 bp, Homo sapiens
ctgattctaaatgct

SEQ ID NO: 59095 - DNA, 15 bp, Homo sapiens
tgattctaaatgcta

SEQ ID NO: 59096 - DNA, 15 bp, Homo sapiens
gattctaaatgctac

SEQ ID NO: 59097 - DNA, 15 bp, Homo sapiens
attctaaatgctaca

SEQ ID NO: 59098 - DNA, 15 bp, Homo sapiens
ttctaaatgctacaa

SEQ ID NO: 59099 - DNA, 15 bp, Homo sapiens
tctaaatgctacaaa

SEQ ID NO: 59100 - DNA, 15 bp, Homo sapiens
ctaaatgctacaaag

SEQ ID NO: 59101 - DNA, 15 bp, Homo sapiens
taaatgctacaaagt

SEQ ID NO: 59102 - DNA, 15 bp, Homo sapiens
aaatgctacaaagtc

SEQ ID NO: 59103 - DNA, 15 bp, Homo sapiens
aatgctacaaagtca

SEQ ID NO: 59104 - DNA, 15 bp, Homo sapiens
atgctacaaagtcaa

SEQ ID NO: 59105 - DNA, 15 bp, Homo sapiens
tgctacaaagtcaaa

SEQ ID NO: 59106 - DNA, 15 bp, Homo sapiens
gctacaaagtcaaat

SEQ ID NO: 59107 - DNA, 15 bp, Homo sapiens
ctacaaagtcaaatt

SEQ ID NO: 59108 - DNA, 15 bp, Homo sapiens
tacaaagtcaaattt

SEQ ID NO: 59109 - DNA, 15 bp, Homo sapiens
acaaagtcaaatttt

SEQ ID NO: 59110 - DNA, 15 bp, Homo sapiens
caaagtcaaatttta

SEQ ID NO: 59111 - DNA, 15 bp, Homo sapiens
aaagtcaaattttag

SEQ ID NO: 59112 - DNA, 15 bp, Homo sapiens
aagtcaaattttagg

SEQ ID NO: 59113 - DNA, 15 bp, Homo sapiens
agtcaaattttagga

SEQ ID NO: 59114 - DNA, 15 bp, Homo sapiens
gtcaaattttaggaa

SEQ ID NO: 59115 - DNA, 15 bp, Homo sapiens
tcaaattttaggaat

SEQ ID NO: 59116 - DNA, 15 bp, Homo sapiens
caaattttaggaatt

SEQ ID NO: 59117 - DNA, 15 bp, Homo sapiens
aaattttaggaattc

SEQ ID NO: 59118 - DNA, 15 bp, Homo sapiens
aattttaggaattcg

SEQ ID NO: 59119 - DNA, 15 bp, Homo sapiens
attttaggaattcga

SEQ ID NO: 59120 - DNA, 15 bp, Homo sapiens
ttttaggaattcgaa

SEQ ID NO: 59121 - DNA, 15 bp, Homo sapiens
tttaggaattcgaat

SEQ ID NO: 59122 - DNA, 15 bp, Homo sapiens
ttaggaattcgaatg

SEQ ID NO: 59123 - DNA, 15 bp, Homo sapiens
taggaattcgaatgt

SEQ ID NO: 59124 - DNA, 15 bp, Homo sapiens
aggaattcgaatgtt

SEQ ID NO: 59125 - DNA, 15 bp, Homo sapiens
ggaattcgaatgttt

SEQ ID NO: 59126 - DNA, 15 bp, Homo sapiens
gaattcgaatgtttt

SEQ ID NO: 59127 - DNA, 15 bp, Homo sapiens
aattcgaatgttttg

SEQ ID NO: 59128 - DNA, 15 bp, Homo sapiens
attcgaatgttttgc

SEQ ID NO: 59129 - DNA, 15 bp, Homo sapiens
ttcgaatgttttgca

SEQ ID NO: 59130 - DNA, 15 bp, Homo sapiens
tcgaatgttttgcaa

SEQ ID NO: 59131 - DNA, 15 bp, Homo sapiens
cgaatgttttgcaaa

SEQ ID NO: 59132 - DNA, 15 bp, Homo sapiens
gaatgttttgcaaaa

SEQ ID NO: 59133 - DNA, 15 bp, Homo sapiens
aatgttttgcaaaag

SEQ ID NO: 59134 - DNA, 15 bp, Homo sapiens
atgttttgcaaaagc

SEQ ID NO: 59135 - DNA, 15 bp, Homo sapiens
tgttttgcaaaagct

SEQ ID NO: 59136 - DNA, 15 bp, Homo sapiens
gttttgcaaaagctt

SEQ ID NO: 59137 - DNA, 15 bp, Homo sapiens
ttttgcaaaagcttc

SEQ ID NO: 59138 - DNA, 15 bp, Homo sapiens
tttgcaaaagcttca

SEQ ID NO: 59139 - DNA, 15 bp, Homo sapiens
ttgcaaaagcttcat

SEQ ID NO: 59140 - DNA, 15 bp, Homo sapiens
tgcaaaagcttcata

SEQ ID NO: 59141 - DNA, 15 bp, Homo sapiens
gcaaaagcttcataa

SEQ ID NO: 59142 - DNA, 15 bp, Homo sapiens
caaaagcttcataat

SEQ ID NO: 59143 - DNA, 15 bp, Homo sapiens
aaaagcttcataatt

SEQ ID NO: 59144 - DNA, 15 bp, Homo sapiens
aaagcttcataatta

SEQ ID NO: 59145 - DNA, 15 bp, Homo sapiens
aagcttcataattag

SEQ ID NO: 59146 - DNA, 15 bp, Homo sapiens
agcttcataattagt

SEQ ID NO: 59147 - DNA, 15 bp, Homo sapiens
gcttcataattagta

SEQ ID NO: 59148 - DNA, 15 bp, Homo sapiens
cttcataattagtaa

SEQ ID NO: 59149 - DNA, 15 bp, Homo sapiens
ttcataattagtaat

SEQ ID NO: 59150 - DNA, 15 bp, Homo sapiens
tcataattagtaatg

SEQ ID NO: 59151 - DNA, 15 bp, Homo sapiens
cataattagtaatga

SEQ ID NO: 59152 - DNA, 15 bp, Homo sapiens
ataattagtaatgaa

SEQ ID NO: 59153 - DNA, 15 bp, Homo sapiens
taattagtaatgaat

SEQ ID NO: 59154 - DNA, 15 bp, Homo sapiens
aattagtaatgaatc

SEQ ID NO: 59155 - DNA, 15 bp, Homo sapiens
attagtaatgaatct

SEQ ID NO: 59156 - DNA, 15 bp, Homo sapiens
ttagtaatgaatcta

SEQ ID NO: 59157 - DNA, 15 bp, Homo sapiens
tagtaatgaatctac

SEQ ID NO: 59158 - DNA, 15 bp, Homo sapiens
agtaatgaatctact

SEQ ID NO: 59159 - DNA, 15 bp, Homo sapiens
gtaatgaatctactg

SEQ ID NO: 59160 - DNA, 15 bp, Homo sapiens
taatgaatctactgt

SEQ ID NO: 59161 - DNA, 15 bp, Homo sapiens
aatgaatctactgta

SEQ ID NO: 59162 - DNA, 15 bp, Homo sapiens
atgaatctactgtac

SEQ ID NO: 59163 - DNA, 15 bp, Homo sapiens
tgaatctactgtaca

SEQ ID NO: 59164 - DNA, 15 bp, Homo sapiens
gaatctactgtacac

SEQ ID NO: 59165 - DNA, 15 bp, Homo sapiens
aatctactgtacaca

SEQ ID NO: 59166 - DNA, 15 bp, Homo sapiens
atctactgtacacac

SEQ ID NO: 59167 - DNA, 15 bp, Homo sapiens
tctactgtacacaca

SEQ ID NO: 59168 - DNA, 15 bp, Homo sapiens
ctactgtacacacac

SEQ ID NO: 59169 - DNA, 15 bp, Homo sapiens
tactgtacacacaca

SEQ ID NO: 59170 - DNA, 15 bp, Homo sapiens
actgtacacacacac

SEQ ID NO: 59171 - DNA, 15 bp, Homo sapiens
ctgtacacacacaca

SEQ ID NO: 59172 - DNA, 15 bp, Homo sapiens
tgtacacacacacac

SEQ ID NO: 59173 - DNA, 15 bp, Homo sapiens
gtacacacacacaca

SEQ ID NO: 59174 - DNA, 15 bp, Homo sapiens
acacacacacacacc

SEQ ID NO: 59175 - DNA, 15 bp, Homo sapiens
cacacacacacacca

SEQ ID NO: 59176 - DNA, 15 bp, Homo sapiens
acacacacacaccag

SEQ ID NO: 59177 - DNA, 15 bp, Homo sapiens
cacacacacaccagc

SEQ ID NO: 59178 - DNA, 15 bp, Homo sapiens
acacacacaccagca

SEQ ID NO: 59179 - DNA, 15 bp, Homo sapiens
cacacacaccagcaa

SEQ ID NO: 59180 - DNA, 15 bp, Homo sapiens
acacacaccagcaaa

SEQ ID NO: 59181 - DNA, 15 bp, Homo sapiens
cacacaccagcaaag

SEQ ID NO: 59182 - DNA, 15 bp, Homo sapiens
acacaccagcaaaga

SEQ ID NO: 59183 - DNA, 15 bp, Homo sapiens
cacaccagcaaagag

SEQ ID NO: 59184 - DNA, 15 bp, Homo sapiens
acaccagcaaagaga

SEQ ID NO: 59185 - DNA, 15 bp, Homo sapiens
caccagcaaagagaa

SEQ ID NO: 59186 - DNA, 15 bp, Homo sapiens
accagcaaagagaac

SEQ ID NO: 59187 - DNA, 15 bp, Homo sapiens
ccagcaaagagaacg

SEQ ID NO: 59188 - DNA, 15 bp, Homo sapiens
cagcaaagagaacgg

SEQ ID NO: 59189 - DNA, 15 bp, Homo sapiens
agcaaagagaacgga

SEQ ID NO: 59190 - DNA, 15 bp, Homo sapiens
gcaaagagaacggaa

SEQ ID NO: 59191 - DNA, 15 bp, Homo sapiens
caaagagaacggaaa

SEQ ID NO: 59192 - DNA, 15 bp, Homo sapiens
aaagagaacggaaaa

SEQ ID NO: 59193 - DNA, 15 bp, Homo sapiens
aagagaacggaaaag

SEQ ID NO: 59194 - DNA, 15 bp, Homo sapiens
agagaacggaaaaga

SEQ ID NO: 59195 - DNA, 15 bp, Homo sapiens
gagaacggaaaagag

SEQ ID NO: 59196 - DNA, 15 bp, Homo sapiens
agaacggaaaagagg

SEQ ID NO: 59197 - DNA, 15 bp, Homo sapiens
gaacggaaaagaggg

SEQ ID NO: 59198 - DNA, 15 bp, Homo sapiens
aacggaaaagaggga

SEQ ID NO: 59199 - DNA, 15 bp, Homo sapiens
acggaaaagagggag

SEQ ID NO: 59200 - DNA, 15 bp, Homo sapiens
cggaaaagagggagg

SEQ ID NO: 59201 - DNA, 15 bp, Homo sapiens
ggaaaagagggaggt

SEQ ID NO: 59202 - DNA, 15 bp, Homo sapiens
gaaaagagggaggtg

SEQ ID NO: 59203 - DNA, 15 bp, Homo sapiens
aaaagagggaggtga

SEQ ID NO: 59204 - DNA, 15 bp, Homo sapiens
aaagagggaggtgaa

SEQ ID NO: 59205 - DNA, 15 bp, Homo sapiens
aagagggaggtgaag

SEQ ID NO: 59206 - DNA, 15 bp, Homo sapiens
agagggaggtgaaga

SEQ ID NO: 59207 - DNA, 15 bp, Homo sapiens
gagggaggtgaagag

SEQ ID NO: 59208 - DNA, 15 bp, Homo sapiens
agggaggtgaagagg

SEQ ID NO: 59209 - DNA, 15 bp, Homo sapiens
gggaggtgaagagga

SEQ ID NO: 59210 - DNA, 15 bp, Homo sapiens
ggaggtgaagaggag

SEQ ID NO: 59211 - DNA, 15 bp, Homo sapiens
gaggtgaagaggaga

SEQ ID NO: 59212 - DNA, 15 bp, Homo sapiens
aggtgaagaggagaa

SEQ ID NO: 59213 - DNA, 15 bp, Homo sapiens
ggtgaagaggagaaa

SEQ ID NO: 59214 - DNA, 15 bp, Homo sapiens
gtgaagaggagaaaa

SEQ ID NO: 59215 - DNA, 15 bp, Homo sapiens
tgaagaggagaaaaa

SEQ ID NO: 59216 - DNA, 15 bp, Homo sapiens
gaagaggagaaaaag

SEQ ID NO: 59217 - DNA, 15 bp, Homo sapiens
aagaggagaaaaaga

SEQ ID NO: 59218 - DNA, 15 bp, Homo sapiens
agaggagaaaaagag

SEQ ID NO: 59219 - DNA, 15 bp, Homo sapiens
gaggagaaaaagaga

SEQ ID NO: 59220 - DNA, 15 bp, Homo sapiens
aggagaaaaagagag

SEQ ID NO: 59221 - DNA, 15 bp, Homo sapiens
ggagaaaaagagaga

SEQ ID NO: 59222 - DNA, 15 bp, Homo sapiens
gagaaaaagagagat

SEQ ID NO: 59223 - DNA, 15 bp, Homo sapiens
agaaaaagagagata

SEQ ID NO: 59224 - DNA, 15 bp, Homo sapiens
gaaaaagagagataa

SEQ ID NO: 59225 - DNA, 15 bp, Homo sapiens
aaaaagagagataaa

SEQ ID NO: 59226 - DNA, 15 bp, Homo sapiens
aaaagagagataaat

SEQ ID NO: 59227 - DNA, 15 bp, Homo sapiens
aaagagagataaatc

SEQ ID NO: 59228 - DNA, 15 bp, Homo sapiens
aagagagataaatct

SEQ ID NO: 59229 - DNA, 15 bp, Homo sapiens
agagagataaatctt

SEQ ID NO: 59230 - DNA, 15 bp, Homo sapiens
gagagataaatctta

SEQ ID NO: 59231 - DNA, 15 bp, Homo sapiens
agagataaatcttac

SEQ ID NO: 59232 - DNA, 15 bp, Homo sapiens
gagataaatcttaca

SEQ ID NO: 59233 - DNA, 15 bp, Homo sapiens
agataaatcttacat

SEQ ID NO: 59234 - DNA, 15 bp, Homo sapiens
gataaatcttacatt

SEQ ID NO: 59235 - DNA, 15 bp, Homo sapiens
ataaatcttacattt

SEQ ID NO: 59236 - DNA, 15 bp, Homo sapiens
taaatcttacatttg

SEQ ID NO: 59237 - DNA, 15 bp, Homo sapiens
aaatcttacatttga

SEQ ID NO: 59238 - DNA, 15 bp, Homo sapiens
aatcttacatttgaa

SEQ ID NO: 59239 - DNA, 15 bp, Homo sapiens
atcttacatttgaat

SEQ ID NO: 59240 - DNA, 15 bp, Homo sapiens
tcttacatttgaatc

SEQ ID NO: 59241 - DNA, 15 bp, Homo sapiens
cttacatttgaatca

SEQ ID NO: 59242 - DNA, 15 bp, Homo sapiens
ttacatttgaatcag

SEQ ID NO: 59243 - DNA, 15 bp, Homo sapiens
tacatttgaatcaga

SEQ ID NO: 59244 - DNA, 15 bp, Homo sapiens
acatttgaatcagac

SEQ ID NO: 59245 - DNA, 15 bp, Homo sapiens
catttgaatcagaca

SEQ ID NO: 59246 - DNA, 15 bp, Homo sapiens
atttgaatcagacat

SEQ ID NO: 59247 - DNA, 15 bp, Homo sapiens
tttgaatcagacatt

SEQ ID NO: 59248 - DNA, 15 bp, Homo sapiens
ttgaatcagacattt

SEQ ID NO: 59249 - DNA, 15 bp, Homo sapiens
tgaatcagacatttg

SEQ ID NO: 59250 - DNA, 15 bp, Homo sapiens
gaatcagacatttgc

SEQ ID NO: 59251 - DNA, 15 bp, Homo sapiens
aatcagacatttgca

SEQ ID NO: 59252 - DNA, 15 bp, Homo sapiens
atcagacatttgcag

SEQ ID NO: 59253 - DNA, 15 bp, Homo sapiens
tcagacatttgcagg

SEQ ID NO: 59254 - DNA, 15 bp, Homo sapiens
cagacatttgcaggt

SEQ ID NO: 59255 - DNA, 15 bp, Homo sapiens
agacatttgcaggtc

SEQ ID NO: 59256 - DNA, 15 bp, Homo sapiens
gacatttgcaggtcc

SEQ ID NO: 59257 - DNA, 15 bp, Homo sapiens
acatttgcaggtcca

SEQ ID NO: 59258 - DNA, 15 bp, Homo sapiens
catttgcaggtccaa

SEQ ID NO: 59259 - DNA, 15 bp, Homo sapiens
atttgcaggtccaag

SEQ ID NO: 59260 - DNA, 15 bp, Homo sapiens
tttgcaggtccaagt

SEQ ID NO: 59261 - DNA, 15 bp, Homo sapiens
ttgcaggtccaagtt

SEQ ID NO: 59262 - DNA, 15 bp, Homo sapiens
tgcaggtccaagtta

SEQ ID NO: 59263 - DNA, 15 bp, Homo sapiens
gcaggtccaagttaa

SEQ ID NO: 59264 - DNA, 15 bp, Homo sapiens
caggtccaagttaac

SEQ ID NO: 59265 - DNA, 15 bp, Homo sapiens
aggtccaagttaact

SEQ ID NO: 59266 - DNA, 15 bp, Homo sapiens
ggtccaagttaacta

SEQ ID NO: 59267 - DNA, 15 bp, Homo sapiens
gtccaagttaactaa

SEQ ID NO: 59268 - DNA, 15 bp, Homo sapiens
tccaagttaactaaa

SEQ ID NO: 59269 - DNA, 15 bp, Homo sapiens
ccaagttaactaaac

SEQ ID NO: 59270 - DNA, 15 bp, Homo sapiens
caagttaactaaact

SEQ ID NO: 59271 - DNA, 15 bp, Homo sapiens
aagttaactaaactc

SEQ ID NO: 59272 - DNA, 15 bp, Homo sapiens
agttaactaaactca

SEQ ID NO: 59273 - DNA, 15 bp, Homo sapiens
gttaactaaactcat

SEQ ID NO: 59274 - DNA, 15 bp, Homo sapiens
ttaactaaactcatt

SEQ ID NO: 59275 - DNA, 15 bp, Homo sapiens
taactaaactcatta

SEQ ID NO: 59276 - DNA, 15 bp, Homo sapiens
aactaaactcattat

SEQ ID NO: 59277 - DNA, 15 bp, Homo sapiens
actaaactcattata

SEQ ID NO: 59278 - DNA, 15 bp, Homo sapiens
ctaaactcattatat

SEQ ID NO: 59279 - DNA, 15 bp, Homo sapiens
taaactcattatatc

SEQ ID NO: 59280 - DNA, 15 bp, Homo sapiens
aaactcattatatcc

SEQ ID NO: 59281 - DNA, 15 bp, Homo sapiens
aactcattatatccg

SEQ ID NO: 59282 - DNA, 15 bp, Homo sapiens
actcattatatccgc

SEQ ID NO: 59283 - DNA, 15 bp, Homo sapiens
ctcattatatccgca

SEQ ID NO: 59284 - DNA, 15 bp, Homo sapiens
tcattatatccgcag

SEQ ID NO: 59285 - DNA, 15 bp, Homo sapiens
cattatatccgcagg

SEQ ID NO: 59286 - DNA, 15 bp, Homo sapiens
attatatccgcagga

SEQ ID NO: 59287 - DNA, 15 bp, Homo sapiens
ttatatccgcaggaa

SEQ ID NO: 59288 - DNA, 15 bp, Homo sapiens
tatatccgcaggaag

SEQ ID NO: 59289 - DNA, 15 bp, Homo sapiens
atatccgcaggaaga

SEQ ID NO: 59290 - DNA, 15 bp, Homo sapiens
tatccgcaggaagac

SEQ ID NO: 59291 - DNA, 15 bp, Homo sapiens
atccgcaggaagact

SEQ ID NO: 59292 - DNA, 15 bp, Homo sapiens
tccgcaggaagactg

SEQ ID NO: 59293 - DNA, 15 bp, Homo sapiens
ccgcaggaagactga

SEQ ID NO: 59294 - DNA, 15 bp, Homo sapiens
cgcaggaagactgag

SEQ ID NO: 59295 - DNA, 15 bp, Homo sapiens
gcaggaagactgagt

SEQ ID NO: 59296 - DNA, 15 bp, Homo sapiens
caggaagactgagtt

SEQ ID NO: 59297 - DNA, 15 bp, Homo sapiens
aggaagactgagttt

SEQ ID NO: 59298 - DNA, 15 bp, Homo sapiens
ggaagactgagtttc

SEQ ID NO: 59299 - DNA, 15 bp, Homo sapiens
gaagactgagtttct

SEQ ID NO: 59300 - DNA, 15 bp, Homo sapiens
aagactgagtttctt

SEQ ID NO: 59301 - DNA, 15 bp, Homo sapiens
agactgagtttcttt

SEQ ID NO: 59302 - DNA, 15 bp, Homo sapiens
gactgagtttctttt

SEQ ID NO: 59303 - DNA, 15 bp, Homo sapiens
actgagtttcttttt

SEQ ID NO: 59304 - DNA, 15 bp, Homo sapiens
ctgagtttctttttt

SEQ ID NO: 59305 - DNA, 15 bp, Homo sapiens
tgagtttcttttttt

SEQ ID NO: 59306 - DNA, 15 bp, Homo sapiens
gagtttctttttttt

SEQ ID NO: 59307 - DNA, 15 bp, Homo sapiens
agtttcttttttttc

SEQ ID NO: 59308 - DNA, 15 bp, Homo sapiens
gtttcttttttttct

SEQ ID NO: 59309 - DNA, 15 bp, Homo sapiens
tttcttttttttctt

SEQ ID NO: 59310 - DNA, 15 bp, Homo sapiens
ttcttttttttcttt

SEQ ID NO: 59311 - DNA, 15 bp, Homo sapiens
tcttttttttctttc

SEQ ID NO: 59312 - DNA, 15 bp, Homo sapiens
cttttttttctttct

SEQ ID NO: 59313 - DNA, 15 bp, Homo sapiens
ttttttttctttctc

SEQ ID NO: 59314 - DNA, 15 bp, Homo sapiens
tttttttctttctcc

SEQ ID NO: 59315 - DNA, 15 bp, Homo sapiens
ttttttctttctccc

SEQ ID NO: 59316 - DNA, 15 bp, Homo sapiens
tttttctttctccct

SEQ ID NO: 59317 - DNA, 15 bp, Homo sapiens
ttttctttctccctt

SEQ ID NO: 59318 - DNA, 15 bp, Homo sapiens
tttctttctcccttt

SEQ ID NO: 59319 - DNA, 15 bp, Homo sapiens
ttctttctccctttg

SEQ ID NO: 59320 - DNA, 15 bp, Homo sapiens
tctttctccctttgc

SEQ ID NO: 59321 - DNA, 15 bp, Homo sapiens
ctttctccctttgcc

SEQ ID NO: 59322 - DNA, 15 bp, Homo sapiens
tttctccctttgccc

SEQ ID NO: 59323 - DNA, 15 bp, Homo sapiens
ttctccctttgcccc

SEQ ID NO: 59324 - DNA, 15 bp, Homo sapiens
tctccctttgcccca

SEQ ID NO: 59325 - DNA, 15 bp, Homo sapiens
ctccctttgccccag

SEQ ID NO: 59326 - DNA, 15 bp, Homo sapiens
tccctttgccccagg

SEQ ID NO: 59327 - DNA, 15 bp, Homo sapiens
ccctttgccccaggg

SEQ ID NO: 59328 - DNA, 15 bp, Homo sapiens
cctttgccccagggt

SEQ ID NO: 59329 - DNA, 15 bp, Homo sapiens
ctttgccccagggtt

SEQ ID NO: 59330 - DNA, 15 bp, Homo sapiens
tttgccccagggttc

SEQ ID NO: 59331 - DNA, 15 bp, Homo sapiens
ttgccccagggttct

SEQ ID NO: 59332 - DNA, 15 bp, Homo sapiens
tgccccagggttctc

SEQ ID NO: 59333 - DNA, 15 bp, Homo sapiens
gccccagggttctca

SEQ ID NO: 59334 - DNA, 15 bp, Homo sapiens
ccccagggttctcac

SEQ ID NO: 59335 - DNA, 15 bp, Homo sapiens
cccagggttctcacc

SEQ ID NO: 59336 - DNA, 15 bp, Homo sapiens
ccagggttctcacct

SEQ ID NO: 59337 - DNA, 15 bp, Homo sapiens
cagggttctcaccta

SEQ ID NO: 59338 - DNA, 15 bp, Homo sapiens
agggttctcacctag

SEQ ID NO: 59339 - DNA, 15 bp, Homo sapiens
gggttctcacctagg

SEQ ID NO: 59340 - DNA, 15 bp, Homo sapiens
ggttctcacctaggg

SEQ ID NO: 59341 - DNA, 15 bp, Homo sapiens
gttctcacctagggc

SEQ ID NO: 59342 - DNA, 15 bp, Homo sapiens
ttctcacctagggca

SEQ ID NO: 59343 - DNA, 15 bp, Homo sapiens
tctcacctagggcaa

SEQ ID NO: 59344 - DNA, 15 bp, Homo sapiens
ctcacctagggcaat

SEQ ID NO: 59345 - DNA, 15 bp, Homo sapiens
tcacctagggcaatt

SEQ ID NO: 59346 - DNA, 15 bp, Homo sapiens
cacctagggcaattc

SEQ ID NO: 59347 - DNA, 15 bp, Homo sapiens
acctagggcaattca

SEQ ID NO: 59348 - DNA, 15 bp, Homo sapiens
cctagggcaattcaa

SEQ ID NO: 59349 - DNA, 15 bp, Homo sapiens
ctagggcaattcaaa

SEQ ID NO: 59350 - DNA, 15 bp, Homo sapiens
tagggcaattcaaac

SEQ ID NO: 59351 - DNA, 15 bp, Homo sapiens
agggcaattcaaact

SEQ ID NO: 59352 - DNA, 15 bp, Homo sapiens
gggcaattcaaactg

SEQ ID NO: 59353 - DNA, 15 bp, Homo sapiens
ggcaattcaaactgg

SEQ ID NO: 59354 - DNA, 15 bp, Homo sapiens
gcaattcaaactggg

SEQ ID NO: 59355 - DNA, 15 bp, Homo sapiens
caattcaaactgggc

SEQ ID NO: 59356 - DNA, 15 bp, Homo sapiens
aattcaaactgggca

SEQ ID NO: 59357 - DNA, 15 bp, Homo sapiens
attcaaactgggcaa

SEQ ID NO: 59358 - DNA, 15 bp, Homo sapiens
ttcaaactgggcaaa

SEQ ID NO: 59359 - DNA, 15 bp, Homo sapiens
tcaaactgggcaaat

SEQ ID NO: 59360 - DNA, 15 bp, Homo sapiens
caaactgggcaaata

SEQ ID NO: 59361 - DNA, 15 bp, Homo sapiens
aaactgggcaaatac

SEQ ID NO: 59362 - DNA, 15 bp, Homo sapiens
aactgggcaaatacc

SEQ ID NO: 59363 - DNA, 15 bp, Homo sapiens
actgggcaaatacca

SEQ ID NO: 59364 - DNA, 15 bp, Homo sapiens
ctgggcaaataccaa

SEQ ID NO: 59365 - DNA, 15 bp, Homo sapiens
tgggcaaataccaag

SEQ ID NO: 59366 - DNA, 15 bp, Homo sapiens
gggcaaataccaaga

SEQ ID NO: 59367 - DNA, 15 bp, Homo sapiens
ggcaaataccaagaa

SEQ ID NO: 59368 - DNA, 15 bp, Homo sapiens
gcaaataccaagaaa

SEQ ID NO: 59369 - DNA, 15 bp, Homo sapiens
caaataccaagaaac

SEQ ID NO: 59370 - DNA, 15 bp, Homo sapiens
aaataccaagaaaca

SEQ ID NO: 59371 - DNA, 15 bp, Homo sapiens
aataccaagaaacaa

SEQ ID NO: 59372 - DNA, 15 bp, Homo sapiens
ataccaagaaacaac

SEQ ID NO: 59373 - DNA, 15 bp, Homo sapiens
taccaagaaacaacc

SEQ ID NO: 59374 - DNA, 15 bp, Homo sapiens
accaagaaacaaccc

SEQ ID NO: 59375 - DNA, 15 bp, Homo sapiens
ccaagaaacaacccc

SEQ ID NO: 59376 - DNA, 15 bp, Homo sapiens
caagaaacaaccccc

SEQ ID NO: 59377 - DNA, 15 bp, Homo sapiens
aagaaacaaccccct

SEQ ID NO: 59378 - DNA, 15 bp, Homo sapiens
agaaacaaccccctc

SEQ ID NO: 59379 - DNA, 15 bp, Homo sapiens
gaaacaaccccctct

SEQ ID NO: 59380 - DNA, 15 bp, Homo sapiens
aaacaaccccctctc

SEQ ID NO: 59381 - DNA, 15 bp, Homo sapiens
aacaaccccctctca

SEQ ID NO: 59382 - DNA, 15 bp, Homo sapiens
acaaccccctctcat

SEQ ID NO: 59383 - DNA, 15 bp, Homo sapiens
caaccccctctcatg

SEQ ID NO: 59384 - DNA, 15 bp, Homo sapiens
aaccccctctcatgc

SEQ ID NO: 59385 - DNA, 15 bp, Homo sapiens
accccctctcatgct

SEQ ID NO: 59386 - DNA, 15 bp, Homo sapiens
ccccctctcatgctc

SEQ ID NO: 59387 - DNA, 15 bp, Homo sapiens
cccctctcatgctct

SEQ ID NO: 59388 - DNA, 15 bp, Homo sapiens
ccctctcatgctctc

SEQ ID NO: 59389 - DNA, 15 bp, Homo sapiens
cctctcatgctctcc

SEQ ID NO: 59390 - DNA, 15 bp, Homo sapiens
ctctcatgctctccc

SEQ ID NO: 59391 - DNA, 15 bp, Homo sapiens
tctcatgctctccct

SEQ ID NO: 59392 - DNA, 15 bp, Homo sapiens
ctcatgctctccctc

SEQ ID NO: 59393 - DNA, 15 bp, Homo sapiens
tcatgctctccctct

SEQ ID NO: 59394 - DNA, 15 bp, Homo sapiens
catgctctccctcta

SEQ ID NO: 59395 - DNA, 15 bp, Homo sapiens
atgctctccctctac

SEQ ID NO: 59396 - DNA, 15 bp, Homo sapiens
tgctctccctctacc

SEQ ID NO: 59397 - DNA, 15 bp, Homo sapiens
gctctccctctacct

SEQ ID NO: 59398 - DNA, 15 bp, Homo sapiens
ctctccctctacctc

SEQ ID NO: 59399 - DNA, 15 bp, Homo sapiens
tctccctctacctcc

SEQ ID NO: 59400 - DNA, 15 bp, Homo sapiens
ctccctctacctcct

SEQ ID NO: 59401 - DNA, 15 bp, Homo sapiens
tccctctacctcctc

SEQ ID NO: 59402 - DNA, 15 bp, Homo sapiens
ccctctacctcctcc

SEQ ID NO: 59403 - DNA, 15 bp, Homo sapiens
cctctacctcctccc

SEQ ID NO: 59404 - DNA, 15 bp, Homo sapiens
ctctacctcctcccc

SEQ ID NO: 59405 - DNA, 15 bp, Homo sapiens
tctacctcctcccct

SEQ ID NO: 59406 - DNA, 15 bp, Homo sapiens
ctacctcctcccctc

SEQ ID NO: 59407 - DNA, 15 bp, Homo sapiens
tacctcctcccctcc

SEQ ID NO: 59408 - DNA, 15 bp, Homo sapiens
acctcctcccctcca

SEQ ID NO: 59409 - DNA, 15 bp, Homo sapiens
cctcctcccctccac

SEQ ID NO: 59410 - DNA, 15 bp, Homo sapiens
ctcctcccctccacc

SEQ ID NO: 59411 - DNA, 15 bp, Homo sapiens
tcctcccctccacca

SEQ ID NO: 59412 - DNA, 15 bp, Homo sapiens
cctcccctccaccac

SEQ ID NO: 59413 - DNA, 15 bp, Homo sapiens
ctcccctccaccacg

SEQ ID NO: 59414 - DNA, 15 bp, Homo sapiens
tcccctccaccacgc

SEQ ID NO: 59415 - DNA, 15 bp, Homo sapiens
cccctccaccacgcg

SEQ ID NO: 59416 - DNA, 15 bp, Homo sapiens
ccctccaccacgcgt

SEQ ID NO: 59417 - DNA, 15 bp, Homo sapiens
cctccaccacgcgtc

SEQ ID NO: 59418 - DNA, 15 bp, Homo sapiens
ctccaccacgcgtcc

SEQ ID NO: 59419 - DNA, 15 bp, Homo sapiens
tccaccacgcgtcct

SEQ ID NO: 59420 - DNA, 15 bp, Homo sapiens
ccaccacgcgtcctc

SEQ ID NO: 59421 - DNA, 15 bp, Homo sapiens
caccacgcgtcctct

SEQ ID NO: 59422 - DNA, 15 bp, Homo sapiens
accacgcgtcctctc

SEQ ID NO: 59423 - DNA, 15 bp, Homo sapiens
ccacgcgtcctctcc

SEQ ID NO: 59424 - DNA, 15 bp, Homo sapiens
cacgcgtcctctccg

SEQ ID NO: 59425 - DNA, 15 bp, Homo sapiens
acgcgtcctctccgg

SEQ ID NO: 59426 - DNA, 15 bp, Homo sapiens
cgcgtcctctccgga

SEQ ID NO: 59427 - DNA, 15 bp, Homo sapiens
gcgtcctctccggaa

SEQ ID NO: 59428 - DNA, 15 bp, Homo sapiens
cgtcctctccggaag

SEQ ID NO: 59429 - DNA, 15 bp, Homo sapiens
gtcctctccggaaga

SEQ ID NO: 59430 - DNA, 15 bp, Homo sapiens
tcctctccggaagac

SEQ ID NO: 59431 - DNA, 15 bp, Homo sapiens
cctctccggaagaca

SEQ ID NO: 59432 - DNA, 15 bp, Homo sapiens
ctctccggaagacag

SEQ ID NO: 59433 - DNA, 15 bp, Homo sapiens
tctccggaagacagt

SEQ ID NO: 59434 - DNA, 15 bp, Homo sapiens
ctccggaagacagta

SEQ ID NO: 59435 - DNA, 15 bp, Homo sapiens
tccggaagacagtat

SEQ ID NO: 59436 - DNA, 15 bp, Homo sapiens
ccggaagacagtatc

SEQ ID NO: 59437 - DNA, 15 bp, Homo sapiens
cggaagacagtatca

SEQ ID NO: 59438 - DNA, 15 bp, Homo sapiens
ggaagacagtatcaa

SEQ ID NO: 59439 - DNA, 15 bp, Homo sapiens
gaagacagtatcaaa

SEQ ID NO: 59440 - DNA, 15 bp, Homo sapiens
aagacagtatcaaaa

SEQ ID NO: 59441 - DNA, 15 bp, Homo sapiens
agacagtatcaaaat

SEQ ID NO: 59442 - DNA, 15 bp, Homo sapiens
gacagtatcaaaata

SEQ ID NO: 59443 - DNA, 15 bp, Homo sapiens
acagtatcaaaatag

SEQ ID NO: 59444 - DNA, 15 bp, Homo sapiens
cagtatcaaaatagc

SEQ ID NO: 59445 - DNA, 15 bp, Homo sapiens
agtatcaaaatagct

SEQ ID NO: 59446 - DNA, 15 bp, Homo sapiens
gtatcaaaatagctc

SEQ ID NO: 59447 - DNA, 15 bp, Homo sapiens
tatcaaaatagctca

SEQ ID NO: 59448 - DNA, 15 bp, Homo sapiens
atcaaaatagctcaa

SEQ ID NO: 59449 - DNA, 15 bp, Homo sapiens
tcaaaatagctcaag

SEQ ID NO: 59450 - DNA, 15 bp, Homo sapiens
caaaatagctcaaga

SEQ ID NO: 59451 - DNA, 15 bp, Homo sapiens
aaaatagctcaagaa

SEQ ID NO: 59452 - DNA, 15 bp, Homo sapiens
aaatagctcaagaat

SEQ ID NO: 59453 - DNA, 15 bp, Homo sapiens
aatagctcaagaatt

SEQ ID NO: 59454 - DNA, 15 bp, Homo sapiens
atagctcaagaattg

SEQ ID NO: 59455 - DNA, 15 bp, Homo sapiens
tagctcaagaattgg

SEQ ID NO: 59456 - DNA, 15 bp, Homo sapiens
agctcaagaattggg

SEQ ID NO: 59457 - DNA, 15 bp, Homo sapiens
gctcaagaattgggg

SEQ ID NO: 59458 - DNA, 15 bp, Homo sapiens
ctcaagaattgggga

SEQ ID NO: 59459 - DNA, 15 bp, Homo sapiens
tcaagaattggggat

SEQ ID NO: 59460 - DNA, 15 bp, Homo sapiens
caagaattggggatg

SEQ ID NO: 59461 - DNA, 15 bp, Homo sapiens
aagaattggggatgc

SEQ ID NO: 59462 - DNA, 15 bp, Homo sapiens
agaattggggatgca

SEQ ID NO: 59463 - DNA, 15 bp, Homo sapiens
gaattggggatgcaa

SEQ ID NO: 59464 - DNA, 15 bp, Homo sapiens
aattggggatgcaag

SEQ ID NO: 59465 - DNA, 15 bp, Homo sapiens
attggggatgcaagg

SEQ ID NO: 59466 - DNA, 15 bp, Homo sapiens
ttggggatgcaaggg

SEQ ID NO: 59467 - DNA, 15 bp, Homo sapiens
tggggatgcaagggg

SEQ ID NO: 59468 - DNA, 15 bp, Homo sapiens
ggggatgcaaggggt

SEQ ID NO: 59469 - DNA, 15 bp, Homo sapiens
gggatgcaaggggtc

SEQ ID NO: 59470 - DNA, 15 bp, Homo sapiens
ggatgcaaggggtcc

SEQ ID NO: 59471 - DNA, 15 bp, Homo sapiens
gatgcaaggggtccc

SEQ ID NO: 59472 - DNA, 15 bp, Homo sapiens
atgcaaggggtcccc

SEQ ID NO: 59473 - DNA, 15 bp, Homo sapiens
tgcaaggggtccccg

SEQ ID NO: 59474 - DNA, 15 bp, Homo sapiens
gcaaggggtccccgc

SEQ ID NO: 59475 - DNA, 15 bp, Homo sapiens
caaggggtccccgcc

SEQ ID NO: 59476 - DNA, 15 bp, Homo sapiens
aaggggtccccgccc

SEQ ID NO: 59477 - DNA, 15 bp, Homo sapiens
aggggtccccgccct

SEQ ID NO: 59478 - DNA, 15 bp, Homo sapiens
ggggtccccgccctg

SEQ ID NO: 59479 - DNA, 15 bp, Homo sapiens
gggtccccgccctgg

SEQ ID NO: 59480 - DNA, 15 bp, Homo sapiens
ggtccccgccctggt

SEQ ID NO: 59481 - DNA, 15 bp, Homo sapiens
gtccccgccctggtg

SEQ ID NO: 59482 - DNA, 15 bp, Homo sapiens
tccccgccctggtgc

SEQ ID NO: 59483 - DNA, 15 bp, Homo sapiens
ccccgccctggtgct

SEQ ID NO: 59484 - DNA, 15 bp, Homo sapiens
cccgccctggtgctt

SEQ ID NO: 59485 - DNA, 15 bp, Homo sapiens
ccgccctggtgctta

SEQ ID NO: 59486 - DNA, 15 bp, Homo sapiens
cgccctggtgcttac

SEQ ID NO: 59487 - DNA, 15 bp, Homo sapiens
gccctggtgcttacc

SEQ ID NO: 59488 - DNA, 15 bp, Homo sapiens
ccctggtgcttacct

SEQ ID NO: 59489 - DNA, 15 bp, Homo sapiens
cctggtgcttacctt

SEQ ID NO: 59490 - DNA, 15 bp, Homo sapiens
ctggtgcttaccttc

SEQ ID NO: 59491 - DNA, 15 bp, Homo sapiens
tggtgcttaccttct

SEQ ID NO: 59492 - DNA, 15 bp, Homo sapiens
ggtgcttaccttctt

SEQ ID NO: 59493 - DNA, 15 bp, Homo sapiens
gtgcttaccttcttt

SEQ ID NO: 59494 - DNA, 15 bp, Homo sapiens
tgcttaccttctttg

SEQ ID NO: 59495 - DNA, 15 bp, Homo sapiens
gcttaccttctttgc

SEQ ID NO: 59496 - DNA, 15 bp, Homo sapiens
cttaccttctttgcg

SEQ ID NO: 59497 - DNA, 15 bp, Homo sapiens
ttaccttctttgcgg

SEQ ID NO: 59498 - DNA, 15 bp, Homo sapiens
taccttctttgcggc

SEQ ID NO: 59499 - DNA, 15 bp, Homo sapiens
accttctttgcggct

SEQ ID NO: 59500 - DNA, 15 bp, Homo sapiens
ccttctttgcggctt

SEQ ID NO: 59501 - DNA, 15 bp, Homo sapiens
cttctttgcggctta

SEQ ID NO: 59502 - DNA, 15 bp, Homo sapiens
ttctttgcggcttac

SEQ ID NO: 59503 - DNA, 15 bp, Homo sapiens
tctttgcggcttaca

SEQ ID NO: 59504 - DNA, 15 bp, Homo sapiens
ctttgcggcttacac

SEQ ID NO: 59505 - DNA, 15 bp, Homo sapiens
tttgcggcttacacc

SEQ ID NO: 59506 - DNA, 15 bp, Homo sapiens
ttgcggcttacacca

SEQ ID NO: 59507 - DNA, 15 bp, Homo sapiens
tgcggcttacaccac

SEQ ID NO: 59508 - DNA, 15 bp, Homo sapiens
gcggcttacaccacc

SEQ ID NO: 59509 - DNA, 15 bp, Homo sapiens
cggcttacaccaccc

SEQ ID NO: 59510 - DNA, 15 bp, Homo sapiens
ggcttacaccacccc

SEQ ID NO: 59511 - DNA, 15 bp, Homo sapiens
gcttacaccaccccg

SEQ ID NO: 59512 - DNA, 15 bp, Homo sapiens
cttacaccaccccgg

SEQ ID NO: 59513 - DNA, 15 bp, Homo sapiens
ttacaccaccccggt

SEQ ID NO: 59514 - DNA, 15 bp, Homo sapiens
tacaccaccccggtg

SEQ ID NO: 59515 - DNA, 15 bp, Homo sapiens
acaccaccccggtgg

SEQ ID NO: 59516 - DNA, 15 bp, Homo sapiens
caccaccccggtggc

SEQ ID NO: 59517 - DNA, 15 bp, Homo sapiens
accaccccggtggct

SEQ ID NO: 59518 - DNA, 15 bp, Homo sapiens
ccaccccggtggcta

SEQ ID NO: 59519 - DNA, 15 bp, Homo sapiens
caccccggtggctag

SEQ ID NO: 59520 - DNA, 15 bp, Homo sapiens
accccggtggctaga

SEQ ID NO: 59521 - DNA, 15 bp, Homo sapiens
ccccggtggctagat

SEQ ID NO: 59522 - DNA, 15 bp, Homo sapiens
cccggtggctagatc

SEQ ID NO: 59523 - DNA, 15 bp, Homo sapiens
ccggtggctagatcc

SEQ ID NO: 59524 - DNA, 15 bp, Homo sapiens
cggtggctagatcct

SEQ ID NO: 59525 - DNA, 15 bp, Homo sapiens
ggtggctagatcctg

SEQ ID NO: 59526 - DNA, 15 bp, Homo sapiens
gtggctagatcctgg

SEQ ID NO: 59527 - DNA, 15 bp, Homo sapiens
tggctagatcctgga

SEQ ID NO: 59528 - DNA, 15 bp, Homo sapiens
ggctagatcctggag

SEQ ID NO: 59529 - DNA, 15 bp, Homo sapiens
gctagatcctggaga

SEQ ID NO: 59530 - DNA, 15 bp, Homo sapiens
ctagatcctggagat

SEQ ID NO: 59531 - DNA, 15 bp, Homo sapiens
tagatcctggagata

SEQ ID NO: 59532 - DNA, 15 bp, Homo sapiens
agatcctggagataa

SEQ ID NO: 59533 - DNA, 15 bp, Homo sapiens
gatcctggagataaa

SEQ ID NO: 59534 - DNA, 15 bp, Homo sapiens
atcctggagataaac

SEQ ID NO: 59535 - DNA, 15 bp, Homo sapiens
tcctggagataaaca

SEQ ID NO: 59536 - DNA, 15 bp, Homo sapiens
cctggagataaacac

SEQ ID NO: 59537 - DNA, 15 bp, Homo sapiens
ctggagataaacact

SEQ ID NO: 59538 - DNA, 15 bp, Homo sapiens
tggagataaacactt

SEQ ID NO: 59539 - DNA, 15 bp, Homo sapiens
ggagataaacacttg

SEQ ID NO: 59540 - DNA, 15 bp, Homo sapiens
gagataaacacttgc

SEQ ID NO: 59541 - DNA, 15 bp, Homo sapiens
agataaacacttgca

SEQ ID NO: 59542 - DNA, 15 bp, Homo sapiens
gataaacacttgcat

SEQ ID NO: 59543 - DNA, 15 bp, Homo sapiens
ataaacacttgcatt

SEQ ID NO: 59544 - DNA, 15 bp, Homo sapiens
taaacacttgcattt

SEQ ID NO: 59545 - DNA, 15 bp, Homo sapiens
aaacacttgcatttc

SEQ ID NO: 59546 - DNA, 15 bp, Homo sapiens
aacacttgcatttcc

SEQ ID NO: 59547 - DNA, 15 bp, Homo sapiens
acacttgcatttccc

SEQ ID NO: 59548 - DNA, 15 bp, Homo sapiens
cacttgcatttccca

SEQ ID NO: 59549 - DNA, 15 bp, Homo sapiens
acttgcatttcccaa

SEQ ID NO: 59550 - DNA, 15 bp, Homo sapiens
cttgcatttcccaaa

SEQ ID NO: 59551 - DNA, 15 bp, Homo sapiens
ttgcatttcccaaag

SEQ ID NO: 59552 - DNA, 15 bp, Homo sapiens
tgcatttcccaaagt

SEQ ID NO: 59553 - DNA, 15 bp, Homo sapiens
gcatttcccaaagtt

SEQ ID NO: 59554 - DNA, 15 bp, Homo sapiens
catttcccaaagtta

SEQ ID NO: 59555 - DNA, 15 bp, Homo sapiens
atttcccaaagttaa

SEQ ID NO: 59556 - DNA, 15 bp, Homo sapiens
tttcccaaagttaac

SEQ ID NO: 59557 - DNA, 15 bp, Homo sapiens
ttcccaaagttaacc

SEQ ID NO: 59558 - DNA, 15 bp, Homo sapiens
tcccaaagttaaccc

SEQ ID NO: 59559 - DNA, 15 bp, Homo sapiens
cccaaagttaaccca

SEQ ID NO: 59560 - DNA, 15 bp, Homo sapiens
ccaaagttaacccag

SEQ ID NO: 59561 - DNA, 15 bp, Homo sapiens
caaagttaacccagt

SEQ ID NO: 59562 - DNA, 15 bp, Homo sapiens
aaagttaacccagta

SEQ ID NO: 59563 - DNA, 15 bp, Homo sapiens
aagttaacccagtat

SEQ ID NO: 59564 - DNA, 15 bp, Homo sapiens
agttaacccagtata

SEQ ID NO: 59565 - DNA, 15 bp, Homo sapiens
gttaacccagtatac

SEQ ID NO: 59566 - DNA, 15 bp, Homo sapiens
ttaacccagtatacc

SEQ ID NO: 59567 - DNA, 15 bp, Homo sapiens
taacccagtatacca

SEQ ID NO: 59568 - DNA, 15 bp, Homo sapiens
aacccagtataccaa

SEQ ID NO: 59569 - DNA, 15 bp, Homo sapiens
acccagtataccaac

SEQ ID NO: 59570 - DNA, 15 bp, Homo sapiens
cccagtataccaacc

SEQ ID NO: 59571 - DNA, 15 bp, Homo sapiens
ccagtataccaaccc

SEQ ID NO: 59572 - DNA, 15 bp, Homo sapiens
cagtataccaacccg

SEQ ID NO: 59573 - DNA, 15 bp, Homo sapiens
agtataccaacccgg

SEQ ID NO: 59574 - DNA, 15 bp, Homo sapiens
gtataccaacccgga

SEQ ID NO: 59575 - DNA, 15 bp, Homo sapiens
tataccaacccggag

SEQ ID NO: 59576 - DNA, 15 bp, Homo sapiens
ataccaacccggagc

SEQ ID NO: 59577 - DNA, 15 bp, Homo sapiens
taccaacccggagct

SEQ ID NO: 59578 - DNA, 15 bp, Homo sapiens
accaacccggagctt

SEQ ID NO: 59579 - DNA, 15 bp, Homo sapiens
ccaacccggagcttg

SEQ ID NO: 59580 - DNA, 15 bp, Homo sapiens
caacccggagcttgc

SEQ ID NO: 59581 - DNA, 15 bp, Homo sapiens
aacccggagcttgcc

SEQ ID NO: 59582 - DNA, 15 bp, Homo sapiens
acccggagcttgcca

SEQ ID NO: 59583 - DNA, 15 bp, Homo sapiens
cccggagcttgccaa

SEQ ID NO: 59584 - DNA, 15 bp, Homo sapiens
ccggagcttgccaag

SEQ ID NO: 59585 - DNA, 15 bp, Homo sapiens
cggagcttgccaaga

SEQ ID NO: 59586 - DNA, 15 bp, Homo sapiens
ggagcttgccaagag

SEQ ID NO: 59587 - DNA, 15 bp, Homo sapiens
gagcttgccaagagt

SEQ ID NO: 59588 - DNA, 15 bp, Homo sapiens
agcttgccaagagtc

SEQ ID NO: 59589 - DNA, 15 bp, Homo sapiens
gcttgccaagagtct

SEQ ID NO: 59590 - DNA, 15 bp, Homo sapiens
cttgccaagagtcta

SEQ ID NO: 59591 - DNA, 15 bp, Homo sapiens
ttgccaagagtctat

SEQ ID NO: 59592 - DNA, 15 bp, Homo sapiens
tgccaagagtctatt

SEQ ID NO: 59593 - DNA, 15 bp, Homo sapiens
gccaagagtctattc

SEQ ID NO: 59594 - DNA, 15 bp, Homo sapiens
ccaagagtctattcc

SEQ ID NO: 59595 - DNA, 15 bp, Homo sapiens
caagagtctattcca

SEQ ID NO: 59596 - DNA, 15 bp, Homo sapiens
aagagtctattccag

SEQ ID NO: 59597 - DNA, 15 bp, Homo sapiens
agagtctattccagc

SEQ ID NO: 59598 - DNA, 15 bp, Homo sapiens
gagtctattccagcc

SEQ ID NO: 59599 - DNA, 15 bp, Homo sapiens
agtctattccagcct

SEQ ID NO: 59600 - DNA, 15 bp, Homo sapiens
gtctattccagccta

SEQ ID NO: 59601 - DNA, 15 bp, Homo sapiens
tctattccagcctac

SEQ ID NO: 59602 - DNA, 15 bp, Homo sapiens
ctattccagcctaca

SEQ ID NO: 59603 - DNA, 15 bp, Homo sapiens
tattccagcctacac

SEQ ID NO: 59604 - DNA, 15 bp, Homo sapiens
attccagcctacacc

SEQ ID NO: 59605 - DNA, 15 bp, Homo sapiens
ttccagcctacaccg

SEQ ID NO: 59606 - DNA, 15 bp, Homo sapiens
tccagcctacaccgc

SEQ ID NO: 59607 - DNA, 15 bp, Homo sapiens
ccagcctacaccgct

SEQ ID NO: 59608 - DNA, 15 bp, Homo sapiens
cagcctacaccgcta

SEQ ID NO: 59609 - DNA, 15 bp, Homo sapiens
agcctacaccgctag

SEQ ID NO: 59610 - DNA, 15 bp, Homo sapiens
gcctacaccgctagg

SEQ ID NO: 59611 - DNA, 15 bp, Homo sapiens
cctacaccgctagga

SEQ ID NO: 59612 - DNA, 15 bp, Homo sapiens
ctacaccgctaggaa

SEQ ID NO: 59613 - DNA, 15 bp, Homo sapiens
tacaccgctaggaag

SEQ ID NO: 59614 - DNA, 15 bp, Homo sapiens
acaccgctaggaagc

SEQ ID NO: 59615 - DNA, 15 bp, Homo sapiens
caccgctaggaagcc

SEQ ID NO: 59616 - DNA, 15 bp, Homo sapiens
accgctaggaagcca

SEQ ID NO: 59617 - DNA, 15 bp, Homo sapiens
ccgctaggaagccaa

SEQ ID NO: 59618 - DNA, 15 bp, Homo sapiens
cgctaggaagccaac

SEQ ID NO: 59619 - DNA, 15 bp, Homo sapiens
gctaggaagccaact

SEQ ID NO: 59620 - DNA, 15 bp, Homo sapiens
ctaggaagccaactt

SEQ ID NO: 59621 - DNA, 15 bp, Homo sapiens
taggaagccaacttc

SEQ ID NO: 59622 - DNA, 15 bp, Homo sapiens
aggaagccaacttca

SEQ ID NO: 59623 - DNA, 15 bp, Homo sapiens
ggaagccaacttcag

SEQ ID NO: 59624 - DNA, 15 bp, Homo sapiens
gaagccaacttcagc

SEQ ID NO: 59625 - DNA, 15 bp, Homo sapiens
aagccaacttcagcg

SEQ ID NO: 59626 - DNA, 15 bp, Homo sapiens
agccaacttcagcga

SEQ ID NO: 59627 - DNA, 15 bp, Homo sapiens
gccaacttcagcgag

SEQ ID NO: 59628 - DNA, 15 bp, Homo sapiens
ccaacttcagcgagc

SEQ ID NO: 59629 - DNA, 15 bp, Homo sapiens
caacttcagcgagct

SEQ ID NO: 59630 - DNA, 15 bp, Homo sapiens
aacttcagcgagctc

SEQ ID NO: 59631 - DNA, 15 bp, Homo sapiens
acttcagcgagctca

SEQ ID NO: 59632 - DNA, 15 bp, Homo sapiens
cttcagcgagctcaa

SEQ ID NO: 59633 - DNA, 15 bp, Homo sapiens
ttcagcgagctcaat

SEQ ID NO: 59634 - DNA, 15 bp, Homo sapiens
tcagcgagctcaatg

SEQ ID NO: 59635 - DNA, 15 bp, Homo sapiens
cagcgagctcaatga

SEQ ID NO: 59636 - DNA, 15 bp, Homo sapiens
agcgagctcaatgag

SEQ ID NO: 59637 - DNA, 15 bp, Homo sapiens
gcgagctcaatgagg

SEQ ID NO: 59638 - DNA, 15 bp, Homo sapiens
cgagctcaatgaggg

SEQ ID NO: 59639 - DNA, 15 bp, Homo sapiens
gagctcaatgagggg

SEQ ID NO: 59640 - DNA, 15 bp, Homo sapiens
agctcaatgagggga

SEQ ID NO: 59641 - DNA, 15 bp, Homo sapiens
gctcaatgaggggac

SEQ ID NO: 59642 - DNA, 15 bp, Homo sapiens
ctcaatgaggggacc

SEQ ID NO: 59643 - DNA, 15 bp, Homo sapiens
tcaatgaggggacca

SEQ ID NO: 59644 - DNA, 15 bp, Homo sapiens
caatgaggggaccaa

SEQ ID NO: 59645 - DNA, 15 bp, Homo sapiens
aatgaggggaccaaa

SEQ ID NO: 59646 - DNA, 15 bp, Homo sapiens
atgaggggaccaaac

SEQ ID NO: 59647 - DNA, 15 bp, Homo sapiens
tgaggggaccaaact

SEQ ID NO: 59648 - DNA, 15 bp, Homo sapiens
gaggggaccaaactg

SEQ ID NO: 59649 - DNA, 15 bp, Homo sapiens
aggggaccaaactgg

SEQ ID NO: 59650 - DNA, 15 bp, Homo sapiens
ggggaccaaactggg

SEQ ID NO: 59651 - DNA, 15 bp, Homo sapiens
gggaccaaactgggg

SEQ ID NO: 59652 - DNA, 15 bp, Homo sapiens
ggaccaaactggggc

SEQ ID NO: 59653 - DNA, 15 bp, Homo sapiens
gaccaaactggggct

SEQ ID NO: 59654 - DNA, 15 bp, Homo sapiens
accaaactggggctc

SEQ ID NO: 59655 - DNA, 15 bp, Homo sapiens
ccaaactggggctcg

SEQ ID NO: 59656 - DNA, 15 bp, Homo sapiens
caaactggggctcgc

SEQ ID NO: 59657 - DNA, 15 bp, Homo sapiens
aaactggggctcgct

SEQ ID NO: 59658 - DNA, 15 bp, Homo sapiens
aactggggctcgctt

SEQ ID NO: 59659 - DNA, 15 bp, Homo sapiens
actggggctcgcttt

SEQ ID NO: 59660 - DNA, 15 bp, Homo sapiens
ctggggctcgctttc

SEQ ID NO: 59661 - DNA, 15 bp, Homo sapiens
tggggctcgctttcc

SEQ ID NO: 59662 - DNA, 15 bp, Homo sapiens
ggggctcgctttcca

SEQ ID NO: 59663 - DNA, 15 bp, Homo sapiens
gggctcgctttccaa

SEQ ID NO: 59664 - DNA, 15 bp, Homo sapiens
ggctcgctttccaaa

SEQ ID NO: 59665 - DNA, 15 bp, Homo sapiens
gctcgctttccaaac

SEQ ID NO: 59666 - DNA, 15 bp, Homo sapiens
ctcgctttccaaacg

SEQ ID NO: 59667 - DNA, 15 bp, Homo sapiens
tcgctttccaaacgc

SEQ ID NO: 59668 - DNA, 15 bp, Homo sapiens
cgctttccaaacgct

SEQ ID NO: 59669 - DNA, 15 bp, Homo sapiens
gctttccaaacgctc

SEQ ID NO: 59670 - DNA, 15 bp, Homo sapiens
ctttccaaacgctcc

SEQ ID NO: 59671 - DNA, 15 bp, Homo sapiens
tttccaaacgctccg

SEQ ID NO: 59672 - DNA, 15 bp, Homo sapiens
ttccaaacgctccgc

SEQ ID NO: 59673 - DNA, 15 bp, Homo sapiens
tccaaacgctccgct

SEQ ID NO: 59674 - DNA, 15 bp, Homo sapiens
ccaaacgctccgctc

SEQ ID NO: 59675 - DNA, 15 bp, Homo sapiens
caaacgctccgctcc

SEQ ID NO: 59676 - DNA, 15 bp, Homo sapiens
aaacgctccgctcca

SEQ ID NO: 59677 - DNA, 15 bp, Homo sapiens
aacgctccgctccaa

SEQ ID NO: 59678 - DNA, 15 bp, Homo sapiens
acgctccgctccaaa

SEQ ID NO: 59679 - DNA, 15 bp, Homo sapiens
cgctccgctccaaaa

SEQ ID NO: 59680 - DNA, 15 bp, Homo sapiens
gctccgctccaaaat

SEQ ID NO: 59681 - DNA, 15 bp, Homo sapiens
ctccgctccaaaatc

SEQ ID NO: 59682 - DNA, 15 bp, Homo sapiens
tccgctccaaaatct

SEQ ID NO: 59683 - DNA, 15 bp, Homo sapiens
ccgctccaaaatctg

SEQ ID NO: 59684 - DNA, 15 bp, Homo sapiens
cgctccaaaatctga

SEQ ID NO: 59685 - DNA, 15 bp, Homo sapiens
gctccaaaatctgac

SEQ ID NO: 59686 - DNA, 15 bp, Homo sapiens
ctccaaaatctgact

SEQ ID NO: 59687 - DNA, 15 bp, Homo sapiens
tccaaaatctgactc

SEQ ID NO: 59688 - DNA, 15 bp, Homo sapiens
ccaaaatctgactct

SEQ ID NO: 59689 - DNA, 15 bp, Homo sapiens
caaaatctgactctc

SEQ ID NO: 59690 - DNA, 15 bp, Homo sapiens
aaaatctgactctct

SEQ ID NO: 59691 - DNA, 15 bp, Homo sapiens
aaatctgactctctc

SEQ ID NO: 59692 - DNA, 15 bp, Homo sapiens
aatctgactctctct

SEQ ID NO: 59693 - DNA, 15 bp, Homo sapiens
atctgactctctctc

SEQ ID NO: 59694 - DNA, 15 bp, Homo sapiens
tctgactctctctcc

SEQ ID NO: 59695 - DNA, 15 bp, Homo sapiens
ctgactctctctcca

SEQ ID NO: 59696 - DNA, 15 bp, Homo sapiens
tgactctctctccag

SEQ ID NO: 59697 - DNA, 15 bp, Homo sapiens
gactctctctccagc

SEQ ID NO: 59698 - DNA, 15 bp, Homo sapiens
actctctctccagcc

SEQ ID NO: 59699 - DNA, 15 bp, Homo sapiens
ctctctctccagccc

SEQ ID NO: 59700 - DNA, 15 bp, Homo sapiens
tctctctccagcccc

SEQ ID NO: 59701 - DNA, 15 bp, Homo sapiens
ctctctccagccccg

SEQ ID NO: 59702 - DNA, 15 bp, Homo sapiens
tctctccagccccga

SEQ ID NO: 59703 - DNA, 15 bp, Homo sapiens
ctctccagccccgat

SEQ ID NO: 59704 - DNA, 15 bp, Homo sapiens
tctccagccccgatc

SEQ ID NO: 59705 - DNA, 15 bp, Homo sapiens
ctccagccccgatct

SEQ ID NO: 59706 - DNA, 15 bp, Homo sapiens
tccagccccgatctc

SEQ ID NO: 59707 - DNA, 15 bp, Homo sapiens
ccagccccgatctca

SEQ ID NO: 59708 - DNA, 15 bp, Homo sapiens
cagccccgatctcag

SEQ ID NO: 59709 - DNA, 15 bp, Homo sapiens
agccccgatctcagt

SEQ ID NO: 59710 - DNA, 15 bp, Homo sapiens
gccccgatctcagtg

SEQ ID NO: 59711 - DNA, 15 bp, Homo sapiens
ccccgatctcagtgt

SEQ ID NO: 59712 - DNA, 15 bp, Homo sapiens
cccgatctcagtgtg

SEQ ID NO: 59713 - DNA, 15 bp, Homo sapiens
ccgatctcagtgtga

SEQ ID NO: 59714 - DNA, 15 bp, Homo sapiens
cgatctcagtgtgag

SEQ ID NO: 59715 - DNA, 15 bp, Homo sapiens
gatctcagtgtgagc

SEQ ID NO: 59716 - DNA, 15 bp, Homo sapiens
atctcagtgtgagcc

SEQ ID NO: 59717 - DNA, 15 bp, Homo sapiens
tctcagtgtgagccg

SEQ ID NO: 59718 - DNA, 15 bp, Homo sapiens
ctcagtgtgagccga

SEQ ID NO: 59719 - DNA, 15 bp, Homo sapiens
tcagtgtgagccgaa

SEQ ID NO: 59720 - DNA, 15 bp, Homo sapiens
cagtgtgagccgaac

SEQ ID NO: 59721 - DNA, 15 bp, Homo sapiens
agtgtgagccgaacc

SEQ ID NO: 59722 - DNA, 15 bp, Homo sapiens
gtgtgagccgaacct

SEQ ID NO: 59723 - DNA, 15 bp, Homo sapiens
tgtgagccgaacctc

SEQ ID NO: 59724 - DNA, 15 bp, Homo sapiens
gtgagccgaacctca

SEQ ID NO: 59725 - DNA, 15 bp, Homo sapiens
tgagccgaacctcag

SEQ ID NO: 59726 - DNA, 15 bp, Homo sapiens
gagccgaacctcaga

SEQ ID NO: 59727 - DNA, 15 bp, Homo sapiens
agccgaacctcagaa

SEQ ID NO: 59728 - DNA, 15 bp, Homo sapiens
gccgaacctcagaaa

SEQ ID NO: 59729 - DNA, 15 bp, Homo sapiens
ccgaacctcagaaaa

SEQ ID NO: 59730 - DNA, 15 bp, Homo sapiens
cgaacctcagaaaag

SEQ ID NO: 59731 - DNA, 15 bp, Homo sapiens
gaacctcagaaaaga

SEQ ID NO: 59732 - DNA, 15 bp, Homo sapiens
aacctcagaaaagac

SEQ ID NO: 59733 - DNA, 15 bp, Homo sapiens
acctcagaaaagacg

SEQ ID NO: 59734 - DNA, 15 bp, Homo sapiens
cctcagaaaagacgc

SEQ ID NO: 59735 - DNA, 15 bp, Homo sapiens
ctcagaaaagacgct

SEQ ID NO: 59736 - DNA, 15 bp, Homo sapiens
tcagaaaagacgctt

SEQ ID NO: 59737 - DNA, 15 bp, Homo sapiens
cagaaaagacgcttt

SEQ ID NO: 59738 - DNA, 15 bp, Homo sapiens
agaaaagacgctttt

SEQ ID NO: 59739 - DNA, 15 bp, Homo sapiens
gaaaagacgcttttt

SEQ ID NO: 59740 - DNA, 15 bp, Homo sapiens
aaaagacgcttttta

SEQ ID NO: 59741 - DNA, 15 bp, Homo sapiens
aaagacgctttttaa

SEQ ID NO: 59742 - DNA, 15 bp, Homo sapiens
aagacgctttttaag

SEQ ID NO: 59743 - DNA, 15 bp, Homo sapiens
agacgctttttaagg

SEQ ID NO: 59744 - DNA, 15 bp, Homo sapiens
gacgctttttaaggg

SEQ ID NO: 59745 - DNA, 15 bp, Homo sapiens
acgctttttaagggc

SEQ ID NO: 59746 - DNA, 15 bp, Homo sapiens
cgctttttaagggcg

SEQ ID NO: 59747 - DNA, 15 bp, Homo sapiens
gctttttaagggcga

SEQ ID NO: 59748 - DNA, 15 bp, Homo sapiens
ctttttaagggcgac

SEQ ID NO: 59749 - DNA, 15 bp, Homo sapiens
tttttaagggcgaca

SEQ ID NO: 59750 - DNA, 15 bp, Homo sapiens
ttttaagggcgacac

SEQ ID NO: 59751 - DNA, 15 bp, Homo sapiens
tttaagggcgacaca

SEQ ID NO: 59752 - DNA, 15 bp, Homo sapiens
ttaagggcgacacag

SEQ ID NO: 59753 - DNA, 15 bp, Homo sapiens
taagggcgacacagg

SEQ ID NO: 59754 - DNA, 15 bp, Homo sapiens
aagggcgacacaggg

SEQ ID NO: 59755 - DNA, 15 bp, Homo sapiens
agggcgacacagggt

SEQ ID NO: 59756 - DNA, 15 bp, Homo sapiens
gggcgacacagggtt

SEQ ID NO: 59757 - DNA, 15 bp, Homo sapiens
ggcgacacagggttg

SEQ ID NO: 59758 - DNA, 15 bp, Homo sapiens
gcgacacagggttgg

SEQ ID NO: 59759 - DNA, 15 bp, Homo sapiens
cgacacagggttggc

SEQ ID NO: 59760 - DNA, 15 bp, Homo sapiens
gacacagggttggct

SEQ ID NO: 59761 - DNA, 15 bp, Homo sapiens
acacagggttggctt

SEQ ID NO: 59762 - DNA, 15 bp, Homo sapiens
cacagggttggcttt

SEQ ID NO: 59763 - DNA, 15 bp, Homo sapiens
acagggttggcttta

SEQ ID NO: 59764 - DNA, 15 bp, Homo sapiens
cagggttggctttac

SEQ ID NO: 59765 - DNA, 15 bp, Homo sapiens
agggttggctttaca

SEQ ID NO: 59766 - DNA, 15 bp, Homo sapiens
gggttggctttacag

SEQ ID NO: 59767 - DNA, 15 bp, Homo sapiens
ggttggctttacagc

SEQ ID NO: 59768 - DNA, 15 bp, Homo sapiens
gttggctttacagcg

SEQ ID NO: 59769 - DNA, 15 bp, Homo sapiens
ttggctttacagcgg

SEQ ID NO: 59770 - DNA, 15 bp, Homo sapiens
tggctttacagcggg

SEQ ID NO: 59771 - DNA, 15 bp, Homo sapiens
ggctttacagcgggg

SEQ ID NO: 59772 - DNA, 15 bp, Homo sapiens
gctttacagcggggc

SEQ ID NO: 59773 - DNA, 15 bp, Homo sapiens
ctttacagcggggcc

SEQ ID NO: 59774 - DNA, 15 bp, Homo sapiens
tttacagcggggcca

SEQ ID NO: 59775 - DNA, 15 bp, Homo sapiens
ttacagcggggccaa

SEQ ID NO: 59776 - DNA, 15 bp, Homo sapiens
tacagcggggccaag

SEQ ID NO: 59777 - DNA, 15 bp, Homo sapiens
acagcggggccaaga

SEQ ID NO: 59778 - DNA, 15 bp, Homo sapiens
cagcggggccaagaa

SEQ ID NO: 59779 - DNA, 15 bp, Homo sapiens
agcggggccaagaag

SEQ ID NO: 59780 - DNA, 15 bp, Homo sapiens
gcggggccaagaaga

SEQ ID NO: 59781 - DNA, 15 bp, Homo sapiens
cggggccaagaagac

SEQ ID NO: 59782 - DNA, 15 bp, Homo sapiens
ggggccaagaagact

SEQ ID NO: 59783 - DNA, 15 bp, Homo sapiens
gggccaagaagacta

SEQ ID NO: 59784 - DNA, 15 bp, Homo sapiens
ggccaagaagactac

SEQ ID NO: 59785 - DNA, 15 bp, Homo sapiens
gccaagaagactacc

SEQ ID NO: 59786 - DNA, 15 bp, Homo sapiens
ccaagaagactacct

SEQ ID NO: 59787 - DNA, 15 bp, Homo sapiens
caagaagactacctg

SEQ ID NO: 59788 - DNA, 15 bp, Homo sapiens
aagaagactacctgg

SEQ ID NO: 59789 - DNA, 15 bp, Homo sapiens
agaagactacctggg

SEQ ID NO: 59790 - DNA, 15 bp, Homo sapiens
gaagactacctgggg

SEQ ID NO: 59791 - DNA, 15 bp, Homo sapiens
aagactacctggggg

SEQ ID NO: 59792 - DNA, 15 bp, Homo sapiens
agactacctgggggt

SEQ ID NO: 59793 - DNA, 15 bp, Homo sapiens
gactacctgggggta

SEQ ID NO: 59794 - DNA, 15 bp, Homo sapiens
actacctgggggtac

SEQ ID NO: 59795 - DNA, 15 bp, Homo sapiens
ctacctgggggtacc

SEQ ID NO: 59796 - DNA, 15 bp, Homo sapiens
tacctgggggtaccg

SEQ ID NO: 59797 - DNA, 15 bp, Homo sapiens
acctgggggtaccgc

SEQ ID NO: 59798 - DNA, 15 bp, Homo sapiens
cctgggggtaccgcc

SEQ ID NO: 59799 - DNA, 15 bp, Homo sapiens
ctgggggtaccgcca

SEQ ID NO: 59800 - DNA, 15 bp, Homo sapiens
tgggggtaccgccac

SEQ ID NO: 59801 - DNA, 15 bp, Homo sapiens
gggggtaccgccacc

SEQ ID NO: 59802 - DNA, 15 bp, Homo sapiens
ggggtaccgccacct

SEQ ID NO: 59803 - DNA, 15 bp, Homo sapiens
gggtaccgccacctc

SEQ ID NO: 59804 - DNA, 15 bp, Homo sapiens
ggtaccgccacctcg

SEQ ID NO: 59805 - DNA, 15 bp, Homo sapiens
gtaccgccacctcgg

SEQ ID NO: 59806 - DNA, 15 bp, Homo sapiens
taccgccacctcgga

SEQ ID NO: 59807 - DNA, 15 bp, Homo sapiens
accgccacctcggac

SEQ ID NO: 59808 - DNA, 15 bp, Homo sapiens
ccgccacctcggaca

SEQ ID NO: 59809 - DNA, 15 bp, Homo sapiens
cgccacctcggacaa

SEQ ID NO: 59810 - DNA, 15 bp, Homo sapiens
gccacctcggacaaa

SEQ ID NO: 59811 - DNA, 15 bp, Homo sapiens
ccacctcggacaaat

SEQ ID NO: 59812 - DNA, 15 bp, Homo sapiens
cacctcggacaaatc

SEQ ID NO: 59813 - DNA, 15 bp, Homo sapiens
acctcggacaaatcc

SEQ ID NO: 59814 - DNA, 15 bp, Homo sapiens
cctcggacaaatccg

SEQ ID NO: 59815 - DNA, 15 bp, Homo sapiens
ctcggacaaatccgt

SEQ ID NO: 59816 - DNA, 15 bp, Homo sapiens
tcggacaaatccgtt

SEQ ID NO: 59817 - DNA, 15 bp, Homo sapiens
cggacaaatccgttg

SEQ ID NO: 59818 - DNA, 15 bp, Homo sapiens
ggacaaatccgttgg

SEQ ID NO: 59819 - DNA, 15 bp, Homo sapiens
gacaaatccgttggc

SEQ ID NO: 59820 - DNA, 15 bp, Homo sapiens
acaaatccgttggct

SEQ ID NO: 59821 - DNA, 15 bp, Homo sapiens
caaatccgttggctc

SEQ ID NO: 59822 - DNA, 15 bp, Homo sapiens
aaatccgttggctct

SEQ ID NO: 59823 - DNA, 15 bp, Homo sapiens
aatccgttggctctg

SEQ ID NO: 59824 - DNA, 15 bp, Homo sapiens
atccgttggctctgt

SEQ ID NO: 59825 - DNA, 15 bp, Homo sapiens
tccgttggctctgtc

SEQ ID NO: 59826 - DNA, 15 bp, Homo sapiens
ccgttggctctgtcc

SEQ ID NO: 59827 - DNA, 15 bp, Homo sapiens
cgttggctctgtcca

SEQ ID NO: 59828 - DNA, 15 bp, Homo sapiens
gttggctctgtccaa

SEQ ID NO: 59829 - DNA, 15 bp, Homo sapiens
ttggctctgtccaag

SEQ ID NO: 59830 - DNA, 15 bp, Homo sapiens
tggctctgtccaagg

SEQ ID NO: 59831 - DNA, 15 bp, Homo sapiens
ggctctgtccaaggt

SEQ ID NO: 59832 - DNA, 15 bp, Homo sapiens
gctctgtccaaggtg

SEQ ID NO: 59833 - DNA, 15 bp, Homo sapiens
ctctgtccaaggtgc

SEQ ID NO: 59834 - DNA, 15 bp, Homo sapiens
tctgtccaaggtgct

SEQ ID NO: 59835 - DNA, 15 bp, Homo sapiens
ctgtccaaggtgctg

SEQ ID NO: 59836 - DNA, 15 bp, Homo sapiens
tgtccaaggtgctga

SEQ ID NO: 59837 - DNA, 15 bp, Homo sapiens
gtccaaggtgctgaa

SEQ ID NO: 59838 - DNA, 15 bp, Homo sapiens
tccaaggtgctgaat

SEQ ID NO: 59839 - DNA, 15 bp, Homo sapiens
ccaaggtgctgaatg

SEQ ID NO: 59840 - DNA, 15 bp, Homo sapiens
caaggtgctgaatgg

SEQ ID NO: 59841 - DNA, 15 bp, Homo sapiens
aaggtgctgaatgga

SEQ ID NO: 59842 - DNA, 15 bp, Homo sapiens
aggtgctgaatggac

SEQ ID NO: 59843 - DNA, 15 bp, Homo sapiens
ggtgctgaatggact

SEQ ID NO: 59844 - DNA, 15 bp, Homo sapiens
gtgctgaatggactc

SEQ ID NO: 59845 - DNA, 15 bp, Homo sapiens
tgctgaatggactcc

SEQ ID NO: 59846 - DNA, 15 bp, Homo sapiens
gctgaatggactcct

SEQ ID NO: 59847 - DNA, 15 bp, Homo sapiens
ctgaatggactccta

SEQ ID NO: 59848 - DNA, 15 bp, Homo sapiens
tgaatggactcctat

SEQ ID NO: 59849 - DNA, 15 bp, Homo sapiens
gaatggactcctatc

SEQ ID NO: 59850 - DNA, 15 bp, Homo sapiens
aatggactcctatcg

SEQ ID NO: 59851 - DNA, 15 bp, Homo sapiens
atggactcctatcgc

SEQ ID NO: 59852 - DNA, 15 bp, Homo sapiens
tggactcctatcgcc

SEQ ID NO: 59853 - DNA, 15 bp, Homo sapiens
ggactcctatcgccc

SEQ ID NO: 59854 - DNA, 15 bp, Homo sapiens
gactcctatcgcccg

SEQ ID NO: 59855 - DNA, 15 bp, Homo sapiens
actcctatcgcccgg

SEQ ID NO: 59856 - DNA, 15 bp, Homo sapiens
ctcctatcgcccgga

SEQ ID NO: 59857 - DNA, 15 bp, Homo sapiens
tcctatcgcccggat

SEQ ID NO: 59858 - DNA, 15 bp, Homo sapiens
cctatcgcccggatt

SEQ ID NO: 59859 - DNA, 15 bp, Homo sapiens
ctatcgcccggatta

SEQ ID NO: 59860 - DNA, 15 bp, Homo sapiens
tatcgcccggattac

SEQ ID NO: 59861 - DNA, 15 bp, Homo sapiens
atcgcccggattaca

SEQ ID NO: 59862 - DNA, 15 bp, Homo sapiens
tcgcccggattacac

SEQ ID NO: 59863 - DNA, 15 bp, Homo sapiens
cgcccggattacaca

SEQ ID NO: 59864 - DNA, 15 bp, Homo sapiens
gcccggattacacac

SEQ ID NO: 59865 - DNA, 15 bp, Homo sapiens
cccggattacacacc

SEQ ID NO: 59866 - DNA, 15 bp, Homo sapiens
ccggattacacaccc

SEQ ID NO: 59867 - DNA, 15 bp, Homo sapiens
cggattacacacccg

SEQ ID NO: 59868 - DNA, 15 bp, Homo sapiens
ggattacacacccgg

SEQ ID NO: 59869 - DNA, 15 bp, Homo sapiens
gattacacacccggc

SEQ ID NO: 59870 - DNA, 15 bp, Homo sapiens
attacacacccggca

SEQ ID NO: 59871 - DNA, 15 bp, Homo sapiens
ttacacacccggcac

SEQ ID NO: 59872 - DNA, 15 bp, Homo sapiens
tacacacccggcaca

SEQ ID NO: 59873 - DNA, 15 bp, Homo sapiens
acacacccggcacag

SEQ ID NO: 59874 - DNA, 15 bp, Homo sapiens
cacacccggcacagc

SEQ ID NO: 59875 - DNA, 15 bp, Homo sapiens
acacccggcacagca

SEQ ID NO: 59876 - DNA, 15 bp, Homo sapiens
cacccggcacagcag

SEQ ID NO: 59877 - DNA, 15 bp, Homo sapiens
acccggcacagcagg

SEQ ID NO: 59878 - DNA, 15 bp, Homo sapiens
cccggcacagcagga

SEQ ID NO: 59879 - DNA, 15 bp, Homo sapiens
ccggcacagcaggag

SEQ ID NO: 59880 - DNA, 15 bp, Homo sapiens
cggcacagcaggagg

SEQ ID NO: 59881 - DNA, 15 bp, Homo sapiens
ggcacagcaggagga

SEQ ID NO: 59882 - DNA, 15 bp, Homo sapiens
gcacagcaggaggaa

SEQ ID NO: 59883 - DNA, 15 bp, Homo sapiens
cacagcaggaggaaa

SEQ ID NO: 59884 - DNA, 15 bp, Homo sapiens
acagcaggaggaaaa

SEQ ID NO: 59885 - DNA, 15 bp, Homo sapiens
cagcaggaggaaaag

SEQ ID NO: 59886 - DNA, 15 bp, Homo sapiens
agcaggaggaaaagg

SEQ ID NO: 59887 - DNA, 15 bp, Homo sapiens
gcaggaggaaaaggc

SEQ ID NO: 59888 - DNA, 15 bp, Homo sapiens
caggaggaaaaggct

SEQ ID NO: 59889 - DNA, 15 bp, Homo sapiens
aggaggaaaaggctt

SEQ ID NO: 59890 - DNA, 15 bp, Homo sapiens
ggaggaaaaggctta

SEQ ID NO: 59891 - DNA, 15 bp, Homo sapiens
gaggaaaaggcttaa

SEQ ID NO: 59892 - DNA, 15 bp, Homo sapiens
aggaaaaggcttaaa

SEQ ID NO: 59893 - DNA, 15 bp, Homo sapiens
ggaaaaggcttaaaa

SEQ ID NO: 59894 - DNA, 15 bp, Homo sapiens
gaaaaggcttaaaaa

SEQ ID NO: 59895 - DNA, 15 bp, Homo sapiens
aaaaggcttaaaaat

SEQ ID NO: 59896 - DNA, 15 bp, Homo sapiens
aaaggcttaaaaatc

SEQ ID NO: 59897 - DNA, 15 bp, Homo sapiens
aaggcttaaaaatct

SEQ ID NO: 59898 - DNA, 15 bp, Homo sapiens
aggcttaaaaatctc

SEQ ID NO: 59899 - DNA, 15 bp, Homo sapiens
ggcttaaaaatctct

SEQ ID NO: 59900 - DNA, 15 bp, Homo sapiens
gcttaaaaatctcta

SEQ ID NO: 59901 - DNA, 15 bp, Homo sapiens
cttaaaaatctctaa

SEQ ID NO: 59902 - DNA, 15 bp, Homo sapiens
ttaaaaatctctaat

SEQ ID NO: 59903 - DNA, 15 bp, Homo sapiens
taaaaatctctaatt

SEQ ID NO: 59904 - DNA, 15 bp, Homo sapiens
aaaaatctctaatta

SEQ ID NO: 59905 - DNA, 15 bp, Homo sapiens
aaaatctctaattaa

SEQ ID NO: 59906 - DNA, 15 bp, Homo sapiens
aaatctctaattaag

SEQ ID NO: 59907 - DNA, 15 bp, Homo sapiens
aatctctaattaagt

SEQ ID NO: 59908 - DNA, 15 bp, Homo sapiens
atctctaattaagtg

SEQ ID NO: 59909 - DNA, 15 bp, Homo sapiens
tctctaattaagtga

SEQ ID NO: 59910 - DNA, 15 bp, Homo sapiens
ctctaattaagtgat

SEQ ID NO: 59911 - DNA, 15 bp, Homo sapiens
tctaattaagtgata

SEQ ID NO: 59912 - DNA, 15 bp, Homo sapiens
ctaattaagtgatac

SEQ ID NO: 59913 - DNA, 15 bp, Homo sapiens
taattaagtgatact

SEQ ID NO: 59914 - DNA, 15 bp, Homo sapiens
aattaagtgatactt

SEQ ID NO: 59915 - DNA, 15 bp, Homo sapiens
attaagtgatacttg

SEQ ID NO: 59916 - DNA, 15 bp, Homo sapiens
ttaagtgatacttga

SEQ ID NO: 59917 - DNA, 15 bp, Homo sapiens
taagtgatacttgat

SEQ ID NO: 59918 - DNA, 15 bp, Homo sapiens
aagtgatacttgata

SEQ ID NO: 59919 - DNA, 15 bp, Homo sapiens
agtgatacttgatat

SEQ ID NO: 59920 - DNA, 15 bp, Homo sapiens
gtgatacttgatatt

SEQ ID NO: 59921 - DNA, 15 bp, Homo sapiens
tgatacttgatattg

SEQ ID NO: 59922 - DNA, 15 bp, Homo sapiens
gatacttgatattgc

SEQ ID NO: 59923 - DNA, 15 bp, Homo sapiens
atacttgatattgct

SEQ ID NO: 59924 - DNA, 15 bp, Homo sapiens
tacttgatattgctc

SEQ ID NO: 59925 - DNA, 15 bp, Homo sapiens
acttgatattgctct

SEQ ID NO: 59926 - DNA, 15 bp, Homo sapiens
cttgatattgctcta

SEQ ID NO: 59927 - DNA, 15 bp, Homo sapiens
ttgatattgctctag

SEQ ID NO: 59928 - DNA, 15 bp, Homo sapiens
tgatattgctctaga

SEQ ID NO: 59929 - DNA, 15 bp, Homo sapiens
gatattgctctagac

SEQ ID NO: 59930 - DNA, 15 bp, Homo sapiens
atattgctctagacg

SEQ ID NO: 59931 - DNA, 15 bp, Homo sapiens
tattgctctagacgg

SEQ ID NO: 59932 - DNA, 15 bp, Homo sapiens
attgctctagacggt

SEQ ID NO: 59933 - DNA, 15 bp, Homo sapiens
ttgctctagacggtt

SEQ ID NO: 59934 - DNA, 15 bp, Homo sapiens
tgctctagacggttt

SEQ ID NO: 59935 - DNA, 15 bp, Homo sapiens
gctctagacggtttc

SEQ ID NO: 59936 - DNA, 15 bp, Homo sapiens
ctctagacggtttct

SEQ ID NO: 59937 - DNA, 15 bp, Homo sapiens
tctagacggtttctt

SEQ ID NO: 59938 - DNA, 15 bp, Homo sapiens
ctagacggtttcttc

SEQ ID NO: 59939 - DNA, 15 bp, Homo sapiens
tagacggtttcttcc

SEQ ID NO: 59940 - DNA, 15 bp, Homo sapiens
agacggtttcttcca

SEQ ID NO: 59941 - DNA, 15 bp, Homo sapiens
gacggtttcttccac

SEQ ID NO: 59942 - DNA, 15 bp, Homo sapiens
acggtttcttccact

SEQ ID NO: 59943 - DNA, 15 bp, Homo sapiens
cggtttcttccactt

SEQ ID NO: 59944 - DNA, 15 bp, Homo sapiens
ggtttcttccacttc

SEQ ID NO: 59945 - DNA, 15 bp, Homo sapiens
gtttcttccacttcc

SEQ ID NO: 59946 - DNA, 15 bp, Homo sapiens
tttcttccacttcct

SEQ ID NO: 59947 - DNA, 15 bp, Homo sapiens
ttcttccacttcctt

SEQ ID NO: 59948 - DNA, 15 bp, Homo sapiens
tcttccacttcctta

SEQ ID NO: 59949 - DNA, 15 bp, Homo sapiens
cttccacttccttac

SEQ ID NO: 59950 - DNA, 15 bp, Homo sapiens
ttccacttccttacg

SEQ ID NO: 59951 - DNA, 15 bp, Homo sapiens
tccacttccttacgg

SEQ ID NO: 59952 - DNA, 15 bp, Homo sapiens
ccacttccttacggt

SEQ ID NO: 59953 - DNA, 15 bp, Homo sapiens
cacttccttacggtt

SEQ ID NO: 59954 - DNA, 15 bp, Homo sapiens
acttccttacggttt

SEQ ID NO: 59955 - DNA, 15 bp, Homo sapiens
cttccttacggtttg

SEQ ID NO: 59956 - DNA, 15 bp, Homo sapiens
ttccttacggtttgt

SEQ ID NO: 59957 - DNA, 15 bp, Homo sapiens
tccttacggtttgtc

SEQ ID NO: 59958 - DNA, 15 bp, Homo sapiens
ccttacggtttgtca

SEQ ID NO: 59959 - DNA, 15 bp, Homo sapiens
cttacggtttgtcac

SEQ ID NO: 59960 - DNA, 15 bp, Homo sapiens
ttacggtttgtcacg

SEQ ID NO: 59961 - DNA, 15 bp, Homo sapiens
tacggtttgtcacgt

SEQ ID NO: 59962 - DNA, 15 bp, Homo sapiens
acggtttgtcacgtg

SEQ ID NO: 59963 - DNA, 15 bp, Homo sapiens
cggtttgtcacgtgc

SEQ ID NO: 59964 - DNA, 15 bp, Homo sapiens
ggtttgtcacgtgcg

SEQ ID NO: 59965 - DNA, 15 bp, Homo sapiens
gtttgtcacgtgcgg

SEQ ID NO: 59966 - DNA, 15 bp, Homo sapiens
tttgtcacgtgcgga

SEQ ID NO: 59967 - DNA, 15 bp, Homo sapiens
ttgtcacgtgcggat

SEQ ID NO: 59968 - DNA, 15 bp, Homo sapiens
tgtcacgtgcggatg

SEQ ID NO: 59969 - DNA, 15 bp, Homo sapiens
gtcacgtgcggatgg

SEQ ID NO: 59970 - DNA, 15 bp, Homo sapiens
tcacgtgcggatggc

SEQ ID NO: 59971 - DNA, 15 bp, Homo sapiens
cacgtgcggatggct

SEQ ID NO: 59972 - DNA, 15 bp, Homo sapiens
acgtgcggatggctt

SEQ ID NO: 59973 - DNA, 15 bp, Homo sapiens
cgtgcggatggcttt

SEQ ID NO: 59974 - DNA, 15 bp, Homo sapiens
gtgcggatggctttg

SEQ ID NO: 59975 - DNA, 15 bp, Homo sapiens
tgcggatggctttgc

SEQ ID NO: 59976 - DNA, 15 bp, Homo sapiens
gcggatggctttgcc

SEQ ID NO: 59977 - DNA, 15 bp, Homo sapiens
cggatggctttgcca

SEQ ID NO: 59978 - DNA, 15 bp, Homo sapiens
ggatggctttgccaa

SEQ ID NO: 59979 - DNA, 15 bp, Homo sapiens
gatggctttgccaaa

SEQ ID NO: 59980 - DNA, 15 bp, Homo sapiens
atggctttgccaaag

SEQ ID NO: 59981 - DNA, 15 bp, Homo sapiens
tggctttgccaaagc

SEQ ID NO: 59982 - DNA, 15 bp, Homo sapiens
ggctttgccaaagcc

SEQ ID NO: 59983 - DNA, 15 bp, Homo sapiens
gctttgccaaagcca

SEQ ID NO: 59984 - DNA, 15 bp, Homo sapiens
ctttgccaaagccat

SEQ ID NO: 59985 - DNA, 15 bp, Homo sapiens
tttgccaaagccatc

SEQ ID NO: 59986 - DNA, 15 bp, Homo sapiens
ttgccaaagccatcc

SEQ ID NO: 59987 - DNA, 15 bp, Homo sapiens
tgccaaagccatcct

SEQ ID NO: 59988 - DNA, 15 bp, Homo sapiens
gccaaagccatcctg

SEQ ID NO: 59989 - DNA, 15 bp, Homo sapiens
ccaaagccatcctgt

SEQ ID NO: 59990 - DNA, 15 bp, Homo sapiens
caaagccatcctgtt

SEQ ID NO: 59991 - DNA, 15 bp, Homo sapiens
aaagccatcctgtta

SEQ ID NO: 59992 - DNA, 15 bp, Homo sapiens
aagccatcctgttaa

SEQ ID NO: 59993 - DNA, 15 bp, Homo sapiens
agccatcctgttaat

SEQ ID NO: 59994 - DNA, 15 bp, Homo sapiens
gccatcctgttaata

SEQ ID NO: 59995 - DNA, 15 bp, Homo sapiens
ccatcctgttaatag

SEQ ID NO: 59996 - DNA, 15 bp, Homo sapiens
catcctgttaatagt

SEQ ID NO: 59997 - DNA, 15 bp, Homo sapiens
atcctgttaatagtt

SEQ ID NO: 59998 - DNA, 15 bp, Homo sapiens
tcctgttaatagttg

SEQ ID NO: 59999 - DNA, 15 bp, Homo sapiens
cctgttaatagttga

SEQ ID NO: 60000 - DNA, 15 bp, Homo sapiens
ctgttaatagttgat

SEQ ID NO: 60001 - DNA, 15 bp, Homo sapiens
tgttaatagttgatc

SEQ ID NO: 60002 - DNA, 15 bp, Homo sapiens
gttaatagttgatca

SEQ ID NO: 60003 - DNA, 15 bp, Homo sapiens
ttaatagttgatcac

SEQ ID NO: 60004 - DNA, 15 bp, Homo sapiens
taatagttgatcaca

SEQ ID NO: 60005 - DNA, 15 bp, Homo sapiens
aatagttgatcacat

SEQ ID NO: 60006 - DNA, 15 bp, Homo sapiens
atagttgatcacatg

SEQ ID NO: 60007 - DNA, 15 bp, Homo sapiens
tagttgatcacatgt

SEQ ID NO: 60008 - DNA, 15 bp, Homo sapiens
agttgatcacatgtt

SEQ ID NO: 60009 - DNA, 15 bp, Homo sapiens
gttgatcacatgttg

SEQ ID NO: 60010 - DNA, 15 bp, Homo sapiens
ttgatcacatgttga

SEQ ID NO: 60011 - DNA, 15 bp, Homo sapiens
tgatcacatgttgat

SEQ ID NO: 60012 - DNA, 15 bp, Homo sapiens
gatcacatgttgatg

SEQ ID NO: 60013 - DNA, 15 bp, Homo sapiens
atcacatgttgatga

SEQ ID NO: 60014 - DNA, 15 bp, Homo sapiens
tcacatgttgatgag

SEQ ID NO: 60015 - DNA, 15 bp, Homo sapiens
cacatgttgatgaga

SEQ ID NO: 60016 - DNA, 15 bp, Homo sapiens
acatgttgatgagaa

SEQ ID NO: 60017 - DNA, 15 bp, Homo sapiens
catgttgatgagaac

SEQ ID NO: 60018 - DNA, 15 bp, Homo sapiens
atgttgatgagaacc

SEQ ID NO: 60019 - DNA, 15 bp, Homo sapiens
tgttgatgagaacct

SEQ ID NO: 60020 - DNA, 15 bp, Homo sapiens
gttgatgagaacctt

SEQ ID NO: 60021 - DNA, 15 bp, Homo sapiens
ttgatgagaaccttt

SEQ ID NO: 60022 - DNA, 15 bp, Homo sapiens
tgatgagaacctttt

SEQ ID NO: 60023 - DNA, 15 bp, Homo sapiens
gatgagaaccttttc

SEQ ID NO: 60024 - DNA, 15 bp, Homo sapiens
atgagaaccttttct

SEQ ID NO: 60025 - DNA, 15 bp, Homo sapiens
tgagaaccttttctt

SEQ ID NO: 60026 - DNA, 15 bp, Homo sapiens
gagaaccttttcttc

SEQ ID NO: 60027 - DNA, 15 bp, Homo sapiens
agaaccttttcttct

SEQ ID NO: 60028 - DNA, 15 bp, Homo sapiens
gaaccttttcttcta

SEQ ID NO: 60029 - DNA, 15 bp, Homo sapiens
aaccttttcttctac

SEQ ID NO: 60030 - DNA, 15 bp, Homo sapiens
accttttcttctacg

SEQ ID NO: 60031 - DNA, 15 bp, Homo sapiens
ccttttcttctacga

SEQ ID NO: 60032 - DNA, 15 bp, Homo sapiens
cttttcttctacgag

SEQ ID NO: 60033 - DNA, 15 bp, Homo sapiens
ttttcttctacgaga

SEQ ID NO: 60034 - DNA, 15 bp, Homo sapiens
tttcttctacgagag

SEQ ID NO: 60035 - DNA, 15 bp, Homo sapiens
ttcttctacgagagg

SEQ ID NO: 60036 - DNA, 15 bp, Homo sapiens
tcttctacgagagga

SEQ ID NO: 60037 - DNA, 15 bp, Homo sapiens
cttctacgagaggat

SEQ ID NO: 60038 - DNA, 15 bp, Homo sapiens
ttctacgagaggatt

SEQ ID NO: 60039 - DNA, 15 bp, Homo sapiens
tctacgagaggatta

SEQ ID NO: 60040 - DNA, 15 bp, Homo sapiens
ctacgagaggattac

SEQ ID NO: 60041 - DNA, 15 bp, Homo sapiens
tacgagaggattacc

SEQ ID NO: 60042 - DNA, 15 bp, Homo sapiens
acgagaggattaccc

SEQ ID NO: 60043 - DNA, 15 bp, Homo sapiens
cgagaggattaccca

SEQ ID NO: 60044 - DNA, 15 bp, Homo sapiens
gagaggattacccat

SEQ ID NO: 60045 - DNA, 15 bp, Homo sapiens
agaggattacccatt

SEQ ID NO: 60046 - DNA, 15 bp, Homo sapiens
gaggattacccatta

SEQ ID NO: 60047 - DNA, 15 bp, Homo sapiens
aggattacccattac

SEQ ID NO: 60048 - DNA, 15 bp, Homo sapiens
ggattacccattacc

SEQ ID NO: 60049 - DNA, 15 bp, Homo sapiens
gattacccattaccg

SEQ ID NO: 60050 - DNA, 15 bp, Homo sapiens
attacccattaccgg

SEQ ID NO: 60051 - DNA, 15 bp, Homo sapiens
ttacccattaccggt

SEQ ID NO: 60052 - DNA, 15 bp, Homo sapiens
tacccattaccggtg

SEQ ID NO: 60053 - DNA, 15 bp, Homo sapiens
acccattaccggtga

SEQ ID NO: 60054 - DNA, 15 bp, Homo sapiens
cccattaccggtgat

SEQ ID NO: 60055 - DNA, 15 bp, Homo sapiens
ccattaccggtgata

SEQ ID NO: 60056 - DNA, 15 bp, Homo sapiens
cattaccggtgatat

SEQ ID NO: 60057 - DNA, 15 bp, Homo sapiens
attaccggtgatatg

SEQ ID NO: 60058 - DNA, 15 bp, Homo sapiens
ttaccggtgatatgc

SEQ ID NO: 60059 - DNA, 15 bp, Homo sapiens
taccggtgatatgca

SEQ ID NO: 60060 - DNA, 15 bp, Homo sapiens
accggtgatatgcac

SEQ ID NO: 60061 - DNA, 15 bp, Homo sapiens
ccggtgatatgcact

SEQ ID NO: 60062 - DNA, 15 bp, Homo sapiens
cggtgatatgcactt

SEQ ID NO: 60063 - DNA, 15 bp, Homo sapiens
ggtgatatgcacttc

SEQ ID NO: 60064 - DNA, 15 bp, Homo sapiens
gtgatatgcacttct

SEQ ID NO: 60065 - DNA, 15 bp, Homo sapiens
tgatatgcacttctg

SEQ ID NO: 60066 - DNA, 15 bp, Homo sapiens
gatatgcacttctga

SEQ ID NO: 60067 - DNA, 15 bp, Homo sapiens
atatgcacttctgac

SEQ ID NO: 60068 - DNA, 15 bp, Homo sapiens
tatgcacttctgact

SEQ ID NO: 60069 - DNA, 15 bp, Homo sapiens
atgcacttctgactt

SEQ ID NO: 60070 - DNA, 15 bp, Homo sapiens
tgcacttctgactta

SEQ ID NO: 60071 - DNA, 15 bp, Homo sapiens
gcacttctgacttat

SEQ ID NO: 60072 - DNA, 15 bp, Homo sapiens
cacttctgacttatt

SEQ ID NO: 60073 - DNA, 15 bp, Homo sapiens
acttctgacttattt

SEQ ID NO: 60074 - DNA, 15 bp, Homo sapiens
cttctgacttatttc

SEQ ID NO: 60075 - DNA, 15 bp, Homo sapiens
ttctgacttatttct

SEQ ID NO: 60076 - DNA, 15 bp, Homo sapiens
tctgacttatttctc

SEQ ID NO: 60077 - DNA, 15 bp, Homo sapiens
ctgacttatttctct

SEQ ID NO: 60078 - DNA, 15 bp, Homo sapiens
tgacttatttctctc

SEQ ID NO: 60079 - DNA, 15 bp, Homo sapiens
gacttatttctctcc

SEQ ID NO: 60080 - DNA, 15 bp, Homo sapiens
acttatttctctccc

SEQ ID NO: 60081 - DNA, 15 bp, Homo sapiens
cttatttctctcccc

SEQ ID NO: 60082 - DNA, 15 bp, Homo sapiens
ttatttctctccccc

SEQ ID NO: 60083 - DNA, 15 bp, Homo sapiens
tatttctctcccccc

SEQ ID NO: 60084 - DNA, 15 bp, Homo sapiens
atttctctcccccca

SEQ ID NO: 60085 - DNA, 15 bp, Homo sapiens
tttctctccccccaa

SEQ ID NO: 60086 - DNA, 15 bp, Homo sapiens
ttctctccccccaac

SEQ ID NO: 60087 - DNA, 15 bp, Homo sapiens
tctctccccccaacc

SEQ ID NO: 60088 - DNA, 15 bp, Homo sapiens
ctctccccccaaccc

SEQ ID NO: 60089 - DNA, 15 bp, Homo sapiens
tctccccccaacccc

SEQ ID NO: 60090 - DNA, 15 bp, Homo sapiens
ctccccccaacccca

SEQ ID NO: 60091 - DNA, 15 bp, Homo sapiens
tccccccaaccccac

SEQ ID NO: 60092 - DNA, 15 bp, Homo sapiens
ccccccaaccccacc

SEQ ID NO: 60093 - DNA, 15 bp, Homo sapiens
cccccaaccccaccc

SEQ ID NO: 60094 - DNA, 15 bp, Homo sapiens
ccccaaccccacccc

SEQ ID NO: 60095 - DNA, 15 bp, Homo sapiens
cccaaccccaccccc

SEQ ID NO: 60096 - DNA, 15 bp, Homo sapiens
ccaaccccacccccc

SEQ ID NO: 60097 - DNA, 15 bp, Homo sapiens
caaccccacccccca

SEQ ID NO: 60098 - DNA, 15 bp, Homo sapiens
aaccccaccccccat

SEQ ID NO: 60099 - DNA, 15 bp, Homo sapiens
accccaccccccatc

SEQ ID NO: 60100 - DNA, 15 bp, Homo sapiens
ccccaccccccatct

SEQ ID NO: 60101 - DNA, 15 bp, Homo sapiens
cccaccccccatcta

SEQ ID NO: 60102 - DNA, 15 bp, Homo sapiens
ccaccccccatctac

SEQ ID NO: 60103 - DNA, 15 bp, Homo sapiens
caccccccatctaca

SEQ ID NO: 60104 - DNA, 15 bp, Homo sapiens
accccccatctacac

SEQ ID NO: 60105 - DNA, 15 bp, Homo sapiens
ccccccatctacacc

SEQ ID NO: 60106 - DNA, 15 bp, Homo sapiens
cccccatctacacct

SEQ ID NO: 60107 - DNA, 15 bp, Homo sapiens
ccccatctacaccta

SEQ ID NO: 60108 - DNA, 15 bp, Homo sapiens
cccatctacacctaa

SEQ ID NO: 60109 - DNA, 15 bp, Homo sapiens
ccatctacacctaaa

SEQ ID NO: 60110 - DNA, 15 bp, Homo sapiens
catctacacctaaac

SEQ ID NO: 60111 - DNA, 15 bp, Homo sapiens
atctacacctaaact

SEQ ID NO: 60112 - DNA, 15 bp, Homo sapiens
tctacacctaaactc

SEQ ID NO: 60113 - DNA, 15 bp, Homo sapiens
ctacacctaaactcc

SEQ ID NO: 60114 - DNA, 15 bp, Homo sapiens
tacacctaaactccc

SEQ ID NO: 60115 - DNA, 15 bp, Homo sapiens
acacctaaactccca

SEQ ID NO: 60116 - DNA, 15 bp, Homo sapiens
cacctaaactcccag

SEQ ID NO: 60117 - DNA, 15 bp, Homo sapiens
acctaaactcccagt

SEQ ID NO: 60118 - DNA, 15 bp, Homo sapiens
cctaaactcccagtc

SEQ ID NO: 60119 - DNA, 15 bp, Homo sapiens
ctaaactcccagtct

SEQ ID NO: 60120 - DNA, 15 bp, Homo sapiens
taaactcccagtctt

SEQ ID NO: 60121 - DNA, 15 bp, Homo sapiens
aaactcccagtcttt

SEQ ID NO: 60122 - DNA, 15 bp, Homo sapiens
aactcccagtcttta

SEQ ID NO: 60123 - DNA, 15 bp, Homo sapiens
actcccagtctttac

SEQ ID NO: 60124 - DNA, 15 bp, Homo sapiens
ctcccagtctttacc

SEQ ID NO: 60125 - DNA, 15 bp, Homo sapiens
tcccagtctttaccc

SEQ ID NO: 60126 - DNA, 15 bp, Homo sapiens
cccagtctttacccc

SEQ ID NO: 60127 - DNA, 15 bp, Homo sapiens
ccagtctttacccca

SEQ ID NO: 60128 - DNA, 15 bp, Homo sapiens
cagtctttaccccac

SEQ ID NO: 60129 - DNA, 15 bp, Homo sapiens
agtctttaccccacc

SEQ ID NO: 60130 - DNA, 15 bp, Homo sapiens
gtctttaccccaccc

SEQ ID NO: 60131 - DNA, 15 bp, Homo sapiens
tctttaccccaccct

SEQ ID NO: 60132 - DNA, 15 bp, Homo sapiens
ctttaccccaccctt

SEQ ID NO: 60133 - DNA, 15 bp, Homo sapiens
tttaccccaccctta

SEQ ID NO: 60134 - DNA, 15 bp, Homo sapiens
ttaccccacccttac

SEQ ID NO: 60135 - DNA, 15 bp, Homo sapiens
taccccacccttacc

SEQ ID NO: 60136 - DNA, 15 bp, Homo sapiens
accccacccttaccc

SEQ ID NO: 60137 - DNA, 15 bp, Homo sapiens
ccccacccttacccc

SEQ ID NO: 60138 - DNA, 15 bp, Homo sapiens
cccacccttaccccc

SEQ ID NO: 60139 - DNA, 15 bp, Homo sapiens
ccacccttaccccca

SEQ ID NO: 60140 - DNA, 15 bp, Homo sapiens
cacccttacccccac

SEQ ID NO: 60141 - DNA, 15 bp, Homo sapiens
acccttacccccact

SEQ ID NO: 60142 - DNA, 15 bp, Homo sapiens
cccttacccccactc

SEQ ID NO: 60143 - DNA, 15 bp, Homo sapiens
ccttacccccactcc

SEQ ID NO: 60144 - DNA, 15 bp, Homo sapiens
cttacccccactcca

SEQ ID NO: 60145 - DNA, 15 bp, Homo sapiens
ttacccccactccac

SEQ ID NO: 60146 - DNA, 15 bp, Homo sapiens
tacccccactccacc

SEQ ID NO: 60147 - DNA, 15 bp, Homo sapiens
acccccactccaccc

SEQ ID NO: 60148 - DNA, 15 bp, Homo sapiens
cccccactccacccc

SEQ ID NO: 60149 - DNA, 15 bp, Homo sapiens
ccccactccaccccc

SEQ ID NO: 60150 - DNA, 15 bp, Homo sapiens
cccactccaccccct

SEQ ID NO: 60151 - DNA, 15 bp, Homo sapiens
ccactccacccccta

SEQ ID NO: 60152 - DNA, 15 bp, Homo sapiens
cactccaccccctaa

SEQ ID NO: 60153 - DNA, 15 bp, Homo sapiens
actccaccccctaac

SEQ ID NO: 60154 - DNA, 15 bp, Homo sapiens
ctccaccccctaacc

SEQ ID NO: 60155 - DNA, 15 bp, Homo sapiens
tccaccccctaaccc

SEQ ID NO: 60156 - DNA, 15 bp, Homo sapiens
ccaccccctaacccc

SEQ ID NO: 60157 - DNA, 15 bp, Homo sapiens
caccccctaacccca

SEQ ID NO: 60158 - DNA, 15 bp, Homo sapiens
accccctaaccccaa

SEQ ID NO: 60159 - DNA, 15 bp, Homo sapiens
ccccctaaccccaac

SEQ ID NO: 60160 - DNA, 15 bp, Homo sapiens
cccctaaccccaacc

SEQ ID NO: 60161 - DNA, 15 bp, Homo sapiens
ccctaaccccaacct

SEQ ID NO: 60162 - DNA, 15 bp, Homo sapiens
cctaaccccaacctc

SEQ ID NO: 60163 - DNA, 15 bp, Homo sapiens
ctaaccccaacctct

SEQ ID NO: 60164 - DNA, 15 bp, Homo sapiens
taaccccaacctcta

SEQ ID NO: 60165 - DNA, 15 bp, Homo sapiens
aaccccaacctctaa

SEQ ID NO: 60166 - DNA, 15 bp, Homo sapiens
accccaacctctaac

SEQ ID NO: 60167 - DNA, 15 bp, Homo sapiens
ccccaacctctaaca

SEQ ID NO: 60168 - DNA, 15 bp, Homo sapiens
cccaacctctaacag

SEQ ID NO: 60169 - DNA, 15 bp, Homo sapiens
ccaacctctaacagc

SEQ ID NO: 60170 - DNA, 15 bp, Homo sapiens
caacctctaacagca

SEQ ID NO: 60171 - DNA, 15 bp, Homo sapiens
aacctctaacagcat

SEQ ID NO: 60172 - DNA, 15 bp, Homo sapiens
acctctaacagcatt

SEQ ID NO: 60173 - DNA, 15 bp, Homo sapiens
cctctaacagcatta

SEQ ID NO: 60174 - DNA, 15 bp, Homo sapiens
ctctaacagcattat

SEQ ID NO: 60175 - DNA, 15 bp, Homo sapiens
tctaacagcattatt

SEQ ID NO: 60176 - DNA, 15 bp, Homo sapiens
ctaacagcattattg

SEQ ID NO: 60177 - DNA, 15 bp, Homo sapiens
taacagcattattgt

SEQ ID NO: 60178 - DNA, 15 bp, Homo sapiens
aacagcattattgtt

SEQ ID NO: 60179 - DNA, 15 bp, Homo sapiens
acagcattattgttt

SEQ ID NO: 60180 - DNA, 15 bp, Homo sapiens
cagcattattgtttt

SEQ ID NO: 60181 - DNA, 15 bp, Homo sapiens
agcattattgttttt

SEQ ID NO: 60182 - DNA, 15 bp, Homo sapiens
gcattattgttttta

SEQ ID NO: 60183 - DNA, 15 bp, Homo sapiens
cattattgtttttag

SEQ ID NO: 60184 - DNA, 15 bp, Homo sapiens
attattgtttttaga

SEQ ID NO: 60185 - DNA, 15 bp, Homo sapiens
ttattgtttttagat

SEQ ID NO: 60186 - DNA, 15 bp, Homo sapiens
tattgtttttagatg

SEQ ID NO: 60187 - DNA, 15 bp, Homo sapiens
attgtttttagatgg

SEQ ID NO: 60188 - DNA, 15 bp, Homo sapiens
ttgtttttagatgga

SEQ ID NO: 60189 - DNA, 15 bp, Homo sapiens
tgtttttagatggaa

SEQ ID NO: 60190 - DNA, 15 bp, Homo sapiens
gtttttagatggaaa

SEQ ID NO: 60191 - DNA, 15 bp, Homo sapiens
tttttagatggaaat

SEQ ID NO: 60192 - DNA, 15 bp, Homo sapiens
ttttagatggaaatt

SEQ ID NO: 60193 - DNA, 15 bp, Homo sapiens
tttagatggaaatta

SEQ ID NO: 60194 - DNA, 15 bp, Homo sapiens
ttagatggaaattaa

SEQ ID NO: 60195 - DNA, 15 bp, Homo sapiens
tagatggaaattaac

SEQ ID NO: 60196 - DNA, 15 bp, Homo sapiens
agatggaaattaacc

SEQ ID NO: 60197 - DNA, 15 bp, Homo sapiens
gatggaaattaaccc

SEQ ID NO: 60198 - DNA, 15 bp, Homo sapiens
atggaaattaacccc

SEQ ID NO: 60199 - DNA, 15 bp, Homo sapiens
tggaaattaaccccc

SEQ ID NO: 60200 - DNA, 15 bp, Homo sapiens
ggaaattaaccccct

SEQ ID NO: 60201 - DNA, 15 bp, Homo sapiens
gaaattaaccccctt

SEQ ID NO: 60202 - DNA, 15 bp, Homo sapiens
aaattaacccccttg

SEQ ID NO: 60203 - DNA, 15 bp, Homo sapiens
aattaacccccttgc

SEQ ID NO: 60204 - DNA, 15 bp, Homo sapiens
attaacccccttgca

SEQ ID NO: 60205 - DNA, 15 bp, Homo sapiens
ttaacccccttgcaa

SEQ ID NO: 60206 - DNA, 15 bp, Homo sapiens
taacccccttgcaaa

SEQ ID NO: 60207 - DNA, 15 bp, Homo sapiens
aacccccttgcaaat

SEQ ID NO: 60208 - DNA, 15 bp, Homo sapiens
acccccttgcaaatg

SEQ ID NO: 60209 - DNA, 15 bp, Homo sapiens
cccccttgcaaatgt

SEQ ID NO: 60210 - DNA, 15 bp, Homo sapiens
ccccttgcaaatgtc

SEQ ID NO: 60211 - DNA, 15 bp, Homo sapiens
cccttgcaaatgtca

SEQ ID NO: 60212 - DNA, 15 bp, Homo sapiens
ccttgcaaatgtcaa

SEQ ID NO: 60213 - DNA, 15 bp, Homo sapiens
cttgcaaatgtcaat

SEQ ID NO: 60214 - DNA, 15 bp, Homo sapiens
ttgcaaatgtcaatt

SEQ ID NO: 60215 - DNA, 15 bp, Homo sapiens
tgcaaatgtcaatta

SEQ ID NO: 60216 - DNA, 15 bp, Homo sapiens
gcaaatgtcaattac

SEQ ID NO: 60217 - DNA, 15 bp, Homo sapiens
caaatgtcaattaca

SEQ ID NO: 60218 - DNA, 15 bp, Homo sapiens
aaatgtcaattacat

SEQ ID NO: 60219 - DNA, 15 bp, Homo sapiens
aatgtcaattacatg

SEQ ID NO: 60220 - DNA, 15 bp, Homo sapiens
atgtcaattacatgc

SEQ ID NO: 60221 - DNA, 15 bp, Homo sapiens
tgtcaattacatgcc

SEQ ID NO: 60222 - DNA, 15 bp, Homo sapiens
gtcaattacatgccc

SEQ ID NO: 60223 - DNA, 15 bp, Homo sapiens
tcaattacatgccca

SEQ ID NO: 60224 - DNA, 15 bp, Homo sapiens
caattacatgcccac

SEQ ID NO: 60225 - DNA, 15 bp, Homo sapiens
aattacatgcccaca

SEQ ID NO: 60226 - DNA, 15 bp, Homo sapiens
attacatgcccacat

SEQ ID NO: 60227 - DNA, 15 bp, Homo sapiens
ttacatgcccacata

SEQ ID NO: 60228 - DNA, 15 bp, Homo sapiens
tacatgcccacatat

SEQ ID NO: 60229 - DNA, 15 bp, Homo sapiens
acatgcccacatata

SEQ ID NO: 60230 - DNA, 15 bp, Homo sapiens
catgcccacatataa

SEQ ID NO: 60231 - DNA, 15 bp, Homo sapiens
atgcccacatataaa

SEQ ID NO: 60232 - DNA, 15 bp, Homo sapiens
tgcccacatataaat

SEQ ID NO: 60233 - DNA, 15 bp, Homo sapiens
gcccacatataaatc

SEQ ID NO: 60234 - DNA, 15 bp, Homo sapiens
cccacatataaatca

SEQ ID NO: 60235 - DNA, 15 bp, Homo sapiens
ccacatataaatcat

SEQ ID NO: 60236 - DNA, 15 bp, Homo sapiens
cacatataaatcata

SEQ ID NO: 60237 - DNA, 15 bp, Homo sapiens
acatataaatcatag

SEQ ID NO: 60238 - DNA, 15 bp, Homo sapiens
catataaatcataga

SEQ ID NO: 60239 - DNA, 15 bp, Homo sapiens
atataaatcatagaa

SEQ ID NO: 60240 - DNA, 15 bp, Homo sapiens
tataaatcatagaat

SEQ ID NO: 60241 - DNA, 15 bp, Homo sapiens
ataaatcatagaata

SEQ ID NO: 60242 - DNA, 15 bp, Homo sapiens
taaatcatagaatat

SEQ ID NO: 60243 - DNA, 15 bp, Homo sapiens
aaatcatagaatatg

SEQ ID NO: 60244 - DNA, 15 bp, Homo sapiens
aatcatagaatatga

SEQ ID NO: 60245 - DNA, 15 bp, Homo sapiens
atcatagaatatgat

SEQ ID NO: 60246 - DNA, 15 bp, Homo sapiens
tcatagaatatgatc

SEQ ID NO: 60247 - DNA, 15 bp, Homo sapiens
catagaatatgatca

SEQ ID NO: 60248 - DNA, 15 bp, Homo sapiens
atagaatatgatcat

SEQ ID NO: 60249 - DNA, 15 bp, Homo sapiens
tagaatatgatcata

SEQ ID NO: 60250 - DNA, 15 bp, Homo sapiens
agaatatgatcatac

SEQ ID NO: 60251 - DNA, 15 bp, Homo sapiens
gaatatgatcataca

SEQ ID NO: 60252 - DNA, 15 bp, Homo sapiens
aatatgatcatacac

SEQ ID NO: 60253 - DNA, 15 bp, Homo sapiens
atatgatcatacacc

SEQ ID NO: 60254 - DNA, 15 bp, Homo sapiens
tatgatcatacacca

SEQ ID NO: 60255 - DNA, 15 bp, Homo sapiens
atgatcatacaccat

SEQ ID NO: 60256 - DNA, 15 bp, Homo sapiens
tgatcatacaccata

SEQ ID NO: 60257 - DNA, 15 bp, Homo sapiens
gatcatacaccatac

SEQ ID NO: 60258 - DNA, 15 bp, Homo sapiens
atcatacaccataca

SEQ ID NO: 60259 - DNA, 15 bp, Homo sapiens
tcatacaccatacac

SEQ ID NO: 60260 - DNA, 15 bp, Homo sapiens
catacaccatacaca

SEQ ID NO: 60261 - DNA, 15 bp, Homo sapiens
atacaccatacacat

SEQ ID NO: 60262 - DNA, 15 bp, Homo sapiens
tacaccatacacatt

SEQ ID NO: 60263 - DNA, 15 bp, Homo sapiens
acaccatacacatta

SEQ ID NO: 60264 - DNA, 15 bp, Homo sapiens
caccatacacattaa

SEQ ID NO: 60265 - DNA, 15 bp, Homo sapiens
accatacacattaag

SEQ ID NO: 60266 - DNA, 15 bp, Homo sapiens
ccatacacattaagg

SEQ ID NO: 60267 - DNA, 15 bp, Homo sapiens
catacacattaagga

SEQ ID NO: 60268 - DNA, 15 bp, Homo sapiens
atacacattaaggaa

SEQ ID NO: 60269 - DNA, 15 bp, Homo sapiens
tacacattaaggaaa

SEQ ID NO: 60270 - DNA, 15 bp, Homo sapiens
acacattaaggaaaa

SEQ ID NO: 60271 - DNA, 15 bp, Homo sapiens
cacattaaggaaaag

SEQ ID NO: 60272 - DNA, 15 bp, Homo sapiens
acattaaggaaaaga

SEQ ID NO: 60273 - DNA, 15 bp, Homo sapiens
cattaaggaaaagaa

SEQ ID NO: 60274 - DNA, 15 bp, Homo sapiens
attaaggaaaagaat

SEQ ID NO: 60275 - DNA, 15 bp, Homo sapiens
ttaaggaaaagaata

SEQ ID NO: 60276 - DNA, 15 bp, Homo sapiens
taaggaaaagaatag

SEQ ID NO: 60277 - DNA, 15 bp, Homo sapiens
aaggaaaagaataga

SEQ ID NO: 60278 - DNA, 15 bp, Homo sapiens
aggaaaagaatagaa

SEQ ID NO: 60279 - DNA, 15 bp, Homo sapiens
ggaaaagaatagaat

SEQ ID NO: 60280 - DNA, 15 bp, Homo sapiens
gaaaagaatagaatg

SEQ ID NO: 60281 - DNA, 15 bp, Homo sapiens
aaaagaatagaatgc

SEQ ID NO: 60282 - DNA, 15 bp, Homo sapiens
aaagaatagaatgca

SEQ ID NO: 60283 - DNA, 15 bp, Homo sapiens
aagaatagaatgcaa

SEQ ID NO: 60284 - DNA, 15 bp, Homo sapiens
agaatagaatgcaag

SEQ ID NO: 60285 - DNA, 15 bp, Homo sapiens
gaatagaatgcaaga

SEQ ID NO: 60286 - DNA, 15 bp, Homo sapiens
aatagaatgcaagac

SEQ ID NO: 60287 - DNA, 15 bp, Homo sapiens
atagaatgcaagact

SEQ ID NO: 60288 - DNA, 15 bp, Homo sapiens
tagaatgcaagactg

SEQ ID NO: 60289 - DNA, 15 bp, Homo sapiens
agaatgcaagactgc

SEQ ID NO: 60290 - DNA, 15 bp, Homo sapiens
gaatgcaagactgct

SEQ ID NO: 60291 - DNA, 15 bp, Homo sapiens
aatgcaagactgctg

SEQ ID NO: 60292 - DNA, 15 bp, Homo sapiens
atgcaagactgctga

SEQ ID NO: 60293 - DNA, 15 bp, Homo sapiens
tgcaagactgctgag

SEQ ID NO: 60294 - DNA, 15 bp, Homo sapiens
gcaagactgctgaga

SEQ ID NO: 60295 - DNA, 15 bp, Homo sapiens
caagactgctgagag

SEQ ID NO: 60296 - DNA, 15 bp, Homo sapiens
aagactgctgagaga

SEQ ID NO: 60297 - DNA, 15 bp, Homo sapiens
agactgctgagagac

SEQ ID NO: 60298 - DNA, 15 bp, Homo sapiens
gactgctgagagaca

SEQ ID NO: 60299 - DNA, 15 bp, Homo sapiens
actgctgagagacaa

SEQ ID NO: 60300 - DNA, 15 bp, Homo sapiens
ctgctgagagacaag

SEQ ID NO: 60301 - DNA, 15 bp, Homo sapiens
tgctgagagacaagc

SEQ ID NO: 60302 - DNA, 15 bp, Homo sapiens
gctgagagacaagca

SEQ ID NO: 60303 - DNA, 15 bp, Homo sapiens
ctgagagacaagcat

SEQ ID NO: 60304 - DNA, 15 bp, Homo sapiens
tgagagacaagcatc

SEQ ID NO: 60305 - DNA, 15 bp, Homo sapiens
gagagacaagcatca

SEQ ID NO: 60306 - DNA, 15 bp, Homo sapiens
agagacaagcatcag

SEQ ID NO: 60307 - DNA, 15 bp, Homo sapiens
gagacaagcatcagc

SEQ ID NO: 60308 - DNA, 15 bp, Homo sapiens
agacaagcatcagcc

SEQ ID NO: 60309 - DNA, 15 bp, Homo sapiens
gacaagcatcagcct

SEQ ID NO: 60310 - DNA, 15 bp, Homo sapiens
acaagcatcagcctt

SEQ ID NO: 60311 - DNA, 15 bp, Homo sapiens
caagcatcagccttg

SEQ ID NO: 60312 - DNA, 15 bp, Homo sapiens
aagcatcagccttga

SEQ ID NO: 60313 - DNA, 15 bp, Homo sapiens
agcatcagccttgaa

SEQ ID NO: 60314 - DNA, 15 bp, Homo sapiens
gcatcagccttgaac

SEQ ID NO: 60315 - DNA, 15 bp, Homo sapiens
catcagccttgaaca

SEQ ID NO: 60316 - DNA, 15 bp, Homo sapiens
atcagccttgaacaa

SEQ ID NO: 60317 - DNA, 15 bp, Homo sapiens
tcagccttgaacaac

SEQ ID NO: 60318 - DNA, 15 bp, Homo sapiens
cagccttgaacaacc

SEQ ID NO: 60319 - DNA, 15 bp, Homo sapiens
agccttgaacaacca

SEQ ID NO: 60320 - DNA, 15 bp, Homo sapiens
gccttgaacaaccaa

SEQ ID NO: 60321 - DNA, 15 bp, Homo sapiens
ccttgaacaaccaat

SEQ ID NO: 60322 - DNA, 15 bp, Homo sapiens
cttgaacaaccaata

SEQ ID NO: 60323 - DNA, 15 bp, Homo sapiens
ttgaacaaccaatat

SEQ ID NO: 60324 - DNA, 15 bp, Homo sapiens
tgaacaaccaatata

SEQ ID NO: 60325 - DNA, 15 bp, Homo sapiens
gaacaaccaatataa

SEQ ID NO: 60326 - DNA, 15 bp, Homo sapiens
aacaaccaatataac

SEQ ID NO: 60327 - DNA, 15 bp, Homo sapiens
acaaccaatataaca

SEQ ID NO: 60328 - DNA, 15 bp, Homo sapiens
caaccaatataacac

SEQ ID NO: 60329 - DNA, 15 bp, Homo sapiens
aaccaatataacaca

SEQ ID NO: 60330 - DNA, 15 bp, Homo sapiens
accaatataacacac

SEQ ID NO: 60331 - DNA, 15 bp, Homo sapiens
ccaatataacacaca

SEQ ID NO: 60332 - DNA, 15 bp, Homo sapiens
caatataacacacac

SEQ ID NO: 60333 - DNA, 15 bp, Homo sapiens
aatataacacacacc

SEQ ID NO: 60334 - DNA, 15 bp, Homo sapiens
atataacacacaccc

SEQ ID NO: 60335 - DNA, 15 bp, Homo sapiens
tataacacacacccc

SEQ ID NO: 60336 - DNA, 15 bp, Homo sapiens
ataacacacaccccc

SEQ ID NO: 60337 - DNA, 15 bp, Homo sapiens
taacacacacccccc

SEQ ID NO: 60338 - DNA, 15 bp, Homo sapiens
aacacacaccccccc

SEQ ID NO: 60339 - DNA, 15 bp, Homo sapiens
acacacaccccccca

SEQ ID NO: 60340 - DNA, 15 bp, Homo sapiens
cacacacccccccac

SEQ ID NO: 60341 - DNA, 15 bp, Homo sapiens
acacacccccccacc

SEQ ID NO: 60342 - DNA, 15 bp, Homo sapiens
cacacccccccaccc

SEQ ID NO: 60343 - DNA, 15 bp, Homo sapiens
acacccccccaccca

SEQ ID NO: 60344 - DNA, 15 bp, Homo sapiens
cacccccccacccag

SEQ ID NO: 60345 - DNA, 15 bp, Homo sapiens
acccccccacccagc

SEQ ID NO: 60346 - DNA, 15 bp, Homo sapiens
cccccccacccagct

SEQ ID NO: 60347 - DNA, 15 bp, Homo sapiens
ccccccacccagctc

SEQ ID NO: 60348 - DNA, 15 bp, Homo sapiens
cccccacccagctcc

SEQ ID NO: 60349 - DNA, 15 bp, Homo sapiens
ccccacccagctcca

SEQ ID NO: 60350 - DNA, 15 bp, Homo sapiens
cccacccagctccaa

SEQ ID NO: 60351 - DNA, 15 bp, Homo sapiens
ccacccagctccaag

SEQ ID NO: 60352 - DNA, 15 bp, Homo sapiens
cacccagctccaagt

SEQ ID NO: 60353 - DNA, 15 bp, Homo sapiens
acccagctccaagtt

SEQ ID NO: 60354 - DNA, 15 bp, Homo sapiens
cccagctccaagttt

SEQ ID NO: 60355 - DNA, 15 bp, Homo sapiens
ccagctccaagtttg

SEQ ID NO: 60356 - DNA, 15 bp, Homo sapiens
cagctccaagtttgt

SEQ ID NO: 60357 - DNA, 15 bp, Homo sapiens
agctccaagtttgtt

SEQ ID NO: 60358 - DNA, 15 bp, Homo sapiens
gctccaagtttgttc

SEQ ID NO: 60359 - DNA, 15 bp, Homo sapiens
ctccaagtttgttcc

SEQ ID NO: 60360 - DNA, 15 bp, Homo sapiens
tccaagtttgttcca

SEQ ID NO: 60361 - DNA, 15 bp, Homo sapiens
ccaagtttgttccac

SEQ ID NO: 60362 - DNA, 15 bp, Homo sapiens
caagtttgttccacg

SEQ ID NO: 60363 - DNA, 15 bp, Homo sapiens
aagtttgttccacgc

SEQ ID NO: 60364 - DNA, 15 bp, Homo sapiens
agtttgttccacgca

SEQ ID NO: 60365 - DNA, 15 bp, Homo sapiens
gtttgttccacgcag

SEQ ID NO: 60366 - DNA, 15 bp, Homo sapiens
tttgttccacgcagt

SEQ ID NO: 60367 - DNA, 15 bp, Homo sapiens
ttgttccacgcagtt

SEQ ID NO: 60368 - DNA, 15 bp, Homo sapiens
tgttccacgcagttc

SEQ ID NO: 60369 - DNA, 15 bp, Homo sapiens
gttccacgcagttcc

SEQ ID NO: 60370 - DNA, 15 bp, Homo sapiens
ttccacgcagttcca

SEQ ID NO: 60371 - DNA, 15 bp, Homo sapiens
tccacgcagttccac

SEQ ID NO: 60372 - DNA, 15 bp, Homo sapiens
ccacgcagttccaca

SEQ ID NO: 60373 - DNA, 15 bp, Homo sapiens
cacgcagttccacat

SEQ ID NO: 60374 - DNA, 15 bp, Homo sapiens
acgcagttccacata

SEQ ID NO: 60375 - DNA, 15 bp, Homo sapiens
cgcagttccacatag

SEQ ID NO: 60376 - DNA, 15 bp, Homo sapiens
gcagttccacatagc

SEQ ID NO: 60377 - DNA, 15 bp, Homo sapiens
cagttccacatagct

SEQ ID NO: 60378 - DNA, 15 bp, Homo sapiens
agttccacatagctg

SEQ ID NO: 60379 - DNA, 15 bp, Homo sapiens
gttccacatagctgt

SEQ ID NO: 60380 - DNA, 15 bp, Homo sapiens
ttccacatagctgtg

SEQ ID NO: 60381 - DNA, 15 bp, Homo sapiens
tccacatagctgtgt

SEQ ID NO: 60382 - DNA, 15 bp, Homo sapiens
ccacatagctgtgtc

SEQ ID NO: 60383 - DNA, 15 bp, Homo sapiens
cacatagctgtgtca

SEQ ID NO: 60384 - DNA, 15 bp, Homo sapiens
acatagctgtgtcaa

SEQ ID NO: 60385 - DNA, 15 bp, Homo sapiens
catagctgtgtcaaa

SEQ ID NO: 60386 - DNA, 15 bp, Homo sapiens
atagctgtgtcaaat

SEQ ID NO: 60387 - DNA, 15 bp, Homo sapiens
tagctgtgtcaaatc

SEQ ID NO: 60388 - DNA, 15 bp, Homo sapiens
agctgtgtcaaatct

SEQ ID NO: 60389 - DNA, 15 bp, Homo sapiens
gctgtgtcaaatctc

SEQ ID NO: 60390 - DNA, 15 bp, Homo sapiens
ctgtgtcaaatctca

SEQ ID NO: 60391 - DNA, 15 bp, Homo sapiens
tgtgtcaaatctcaa

SEQ ID NO: 60392 - DNA, 15 bp, Homo sapiens
gtgtcaaatctcaaa

SEQ ID NO: 60393 - DNA, 15 bp, Homo sapiens
tgtcaaatctcaaat

SEQ ID NO: 60394 - DNA, 15 bp, Homo sapiens
gtcaaatctcaaatg

SEQ ID NO: 60395 - DNA, 15 bp, Homo sapiens
tcaaatctcaaatga

SEQ ID NO: 60396 - DNA, 15 bp, Homo sapiens
caaatctcaaatgat

SEQ ID NO: 60397 - DNA, 15 bp, Homo sapiens
aaatctcaaatgatt

SEQ ID NO: 60398 - DNA, 15 bp, Homo sapiens
aatctcaaatgattc

SEQ ID NO: 60399 - DNA, 15 bp, Homo sapiens
atctcaaatgattcc

SEQ ID NO: 60400 - DNA, 15 bp, Homo sapiens
tctcaaatgattcca

SEQ ID NO: 60401 - DNA, 15 bp, Homo sapiens
ctcaaatgattccaa

SEQ ID NO: 60402 - DNA, 15 bp, Homo sapiens
tcaaatgattccaat

SEQ ID NO: 60403 - DNA, 15 bp, Homo sapiens
caaatgattccaatt

SEQ ID NO: 60404 - DNA, 15 bp, Homo sapiens
aaatgattccaatta

SEQ ID NO: 60405 - DNA, 15 bp, Homo sapiens
aatgattccaattaa

SEQ ID NO: 60406 - DNA, 15 bp, Homo sapiens
atgattccaattaaa

SEQ ID NO: 60407 - DNA, 15 bp, Homo sapiens
tgattccaattaaag

SEQ ID NO: 60408 - DNA, 15 bp, Homo sapiens
gattccaattaaagt

SEQ ID NO: 60409 - DNA, 15 bp, Homo sapiens
attccaattaaagtt

SEQ ID NO: 60410 - DNA, 15 bp, Homo sapiens
ttccaattaaagttg

SEQ ID NO: 60411 - DNA, 15 bp, Homo sapiens
tccaattaaagttgc

SEQ ID NO: 60412 - DNA, 15 bp, Homo sapiens
ccaattaaagttgca

SEQ ID NO: 60413 - DNA, 15 bp, Homo sapiens
caattaaagttgcac

SEQ ID NO: 60414 - DNA, 15 bp, Homo sapiens
aattaaagttgcact

SEQ ID NO: 60415 - DNA, 15 bp, Homo sapiens
attaaagttgcactg

SEQ ID NO: 60416 - DNA, 15 bp, Homo sapiens
ttaaagttgcactgt

SEQ ID NO: 60417 - DNA, 15 bp, Homo sapiens
taaagttgcactgtg

SEQ ID NO: 60418 - DNA, 15 bp, Homo sapiens
aaagttgcactgtgt

SEQ ID NO: 60419 - DNA, 15 bp, Homo sapiens
aagttgcactgtgta

SEQ ID NO: 60420 - DNA, 15 bp, Homo sapiens
agttgcactgtgtaa

SEQ ID NO: 60421 - DNA, 15 bp, Homo sapiens
gttgcactgtgtaaa

SEQ ID NO: 60422 - DNA, 15 bp, Homo sapiens
ttgcactgtgtaaaa

SEQ ID NO: 60423 - DNA, 15 bp, Homo sapiens
tgcactgtgtaaaaa

SEQ ID NO: 60424 - DNA, 15 bp, Homo sapiens
gcactgtgtaaaaac

SEQ ID NO: 60425 - DNA, 15 bp, Homo sapiens
cactgtgtaaaaacc

SEQ ID NO: 60426 - DNA, 15 bp, Homo sapiens
actgtgtaaaaaccc

SEQ ID NO: 60427 - DNA, 15 bp, Homo sapiens
ctgtgtaaaaacccg

SEQ ID NO: 60428 - DNA, 15 bp, Homo sapiens
tgtgtaaaaacccga

SEQ ID NO: 60429 - DNA, 15 bp, Homo sapiens
gtgtaaaaacccgat

SEQ ID NO: 60430 - DNA, 15 bp, Homo sapiens
tgtaaaaacccgatt

SEQ ID NO: 60431 - DNA, 15 bp, Homo sapiens
gtaaaaacccgattc

SEQ ID NO: 60432 - DNA, 15 bp, Homo sapiens
taaaaacccgattcc

SEQ ID NO: 60433 - DNA, 15 bp, Homo sapiens
aaaaacccgattccc

SEQ ID NO: 60434 - DNA, 15 bp, Homo sapiens
aaaacccgattcccc

SEQ ID NO: 60435 - DNA, 15 bp, Homo sapiens
aaacccgattcccct

SEQ ID NO: 60436 - DNA, 15 bp, Homo sapiens
aacccgattcccctg

SEQ ID NO: 60437 - DNA, 15 bp, Homo sapiens
acccgattcccctgg

SEQ ID NO: 60438 - DNA, 15 bp, Homo sapiens
cccgattcccctggc

SEQ ID NO: 60439 - DNA, 15 bp, Homo sapiens
ccgattcccctggcc

SEQ ID NO: 60440 - DNA, 15 bp, Homo sapiens
cgattcccctggcct

SEQ ID NO: 60441 - DNA, 15 bp, Homo sapiens
gattcccctggcctg

SEQ ID NO: 60442 - DNA, 15 bp, Homo sapiens
attcccctggcctga

SEQ ID NO: 60443 - DNA, 15 bp, Homo sapiens
ttcccctggcctgag

SEQ ID NO: 60444 - DNA, 15 bp, Homo sapiens
tcccctggcctgagt

SEQ ID NO: 60445 - DNA, 15 bp, Homo sapiens
cccctggcctgagta

SEQ ID NO: 60446 - DNA, 15 bp, Homo sapiens
ccctggcctgagtag

SEQ ID NO: 60447 - DNA, 15 bp, Homo sapiens
cctggcctgagtagc

SEQ ID NO: 60448 - DNA, 15 bp, Homo sapiens
ctggcctgagtagct

SEQ ID NO: 60449 - DNA, 15 bp, Homo sapiens
tggcctgagtagctg

SEQ ID NO: 60450 - DNA, 15 bp, Homo sapiens
ggcctgagtagctgc

SEQ ID NO: 60451 - DNA, 15 bp, Homo sapiens
gcctgagtagctgct

SEQ ID NO: 60452 - DNA, 15 bp, Homo sapiens
cctgagtagctgctg

SEQ ID NO: 60453 - DNA, 15 bp, Homo sapiens
ctgagtagctgctgt

SEQ ID NO: 60454 - DNA, 15 bp, Homo sapiens
tgagtagctgctgtt

SEQ ID NO: 60455 - DNA, 15 bp, Homo sapiens
gagtagctgctgttc

SEQ ID NO: 60456 - DNA, 15 bp, Homo sapiens
agtagctgctgttct

SEQ ID NO: 60457 - DNA, 15 bp, Homo sapiens
gtagctgctgttctt

SEQ ID NO: 60458 - DNA, 15 bp, Homo sapiens
tagctgctgttcttt

SEQ ID NO: 60459 - DNA, 15 bp, Homo sapiens
agctgctgttctttg

SEQ ID NO: 60460 - DNA, 15 bp, Homo sapiens
gctgctgttctttgg

SEQ ID NO: 60461 - DNA, 15 bp, Homo sapiens
ctgctgttctttggc

SEQ ID NO: 60462 - DNA, 15 bp, Homo sapiens
tgctgttctttggcg

SEQ ID NO: 60463 - DNA, 15 bp, Homo sapiens
gctgttctttggcgt

SEQ ID NO: 60464 - DNA, 15 bp, Homo sapiens
ctgttctttggcgtg

SEQ ID NO: 60465 - DNA, 15 bp, Homo sapiens
tgttctttggcgtgt

SEQ ID NO: 60466 - DNA, 15 bp, Homo sapiens
gttctttggcgtgtg

SEQ ID NO: 60467 - DNA, 15 bp, Homo sapiens
ttctttggcgtgtga

SEQ ID NO: 60468 - DNA, 15 bp, Homo sapiens
tctttggcgtgtgaa

SEQ ID NO: 60469 - DNA, 15 bp, Homo sapiens
ctttggcgtgtgaag

SEQ ID NO: 60470 - DNA, 15 bp, Homo sapiens
tttggcgtgtgaagt

SEQ ID NO: 60471 - DNA, 15 bp, Homo sapiens
ttggcgtgtgaagtg

SEQ ID NO: 60472 - DNA, 15 bp, Homo sapiens
tggcgtgtgaagtgc

SEQ ID NO: 60473 - DNA, 15 bp, Homo sapiens
ggcgtgtgaagtgct

SEQ ID NO: 60474 - DNA, 15 bp, Homo sapiens
gcgtgtgaagtgcta

SEQ ID NO: 60475 - DNA, 15 bp, Homo sapiens
cgtgtgaagtgctag

SEQ ID NO: 60476 - DNA, 15 bp, Homo sapiens
gtgtgaagtgctagg

SEQ ID NO: 60477 - DNA, 15 bp, Homo sapiens
tgtgaagtgctagga

SEQ ID NO: 60478 - DNA, 15 bp, Homo sapiens
gtgaagtgctaggaa

SEQ ID NO: 60479 - DNA, 15 bp, Homo sapiens
tgaagtgctaggaag

SEQ ID NO: 60480 - DNA, 15 bp, Homo sapiens
gaagtgctaggaaga

SEQ ID NO: 60481 - DNA, 15 bp, Homo sapiens
aagtgctaggaagag

SEQ ID NO: 60482 - DNA, 15 bp, Homo sapiens
agtgctaggaagagc

SEQ ID NO: 60483 - DNA, 15 bp, Homo sapiens
gtgctaggaagagcc

SEQ ID NO: 60484 - DNA, 15 bp, Homo sapiens
tgctaggaagagccg

SEQ ID NO: 60485 - DNA, 15 bp, Homo sapiens
gctaggaagagccgt

SEQ ID NO: 60486 - DNA, 15 bp, Homo sapiens
ctaggaagagccgtg

SEQ ID NO: 60487 - DNA, 15 bp, Homo sapiens
taggaagagccgtga

SEQ ID NO: 60488 - DNA, 15 bp, Homo sapiens
aggaagagccgtgat

SEQ ID NO: 60489 - DNA, 15 bp, Homo sapiens
ggaagagccgtgata

SEQ ID NO: 60490 - DNA, 15 bp, Homo sapiens
gaagagccgtgatat

SEQ ID NO: 60491 - DNA, 15 bp, Homo sapiens
aagagccgtgatatg

SEQ ID NO: 60492 - DNA, 15 bp, Homo sapiens
agagccgtgatatgc

SEQ ID NO: 60493 - DNA, 15 bp, Homo sapiens
gagccgtgatatgcc

SEQ ID NO: 60494 - DNA, 15 bp, Homo sapiens
agccgtgatatgccc

SEQ ID NO: 60495 - DNA, 15 bp, Homo sapiens
gccgtgatatgcccg

SEQ ID NO: 60496 - DNA, 15 bp, Homo sapiens
ccgtgatatgcccgt

SEQ ID NO: 60497 - DNA, 15 bp, Homo sapiens
cgtgatatgcccgtt

SEQ ID NO: 60498 - DNA, 15 bp, Homo sapiens
gtgatatgcccgttg

SEQ ID NO: 60499 - DNA, 15 bp, Homo sapiens
tgatatgcccgttgt

SEQ ID NO: 60500 - DNA, 15 bp, Homo sapiens
gatatgcccgttgtt

SEQ ID NO: 60501 - DNA, 15 bp, Homo sapiens
atatgcccgttgtta

SEQ ID NO: 60502 - DNA, 15 bp, Homo sapiens
tatgcccgttgttaa

SEQ ID NO: 60503 - DNA, 15 bp, Homo sapiens
atgcccgttgttaag

SEQ ID NO: 60504 - DNA, 15 bp, Homo sapiens
tgcccgttgttaagc

SEQ ID NO: 60505 - DNA, 15 bp, Homo sapiens
gcccgttgttaagca

SEQ ID NO: 60506 - DNA, 15 bp, Homo sapiens
cccgttgttaagcaa

SEQ ID NO: 60507 - DNA, 15 bp, Homo sapiens
ccgttgttaagcaac

SEQ ID NO: 60508 - DNA, 15 bp, Homo sapiens
cgttgttaagcaaca

SEQ ID NO: 60509 - DNA, 15 bp, Homo sapiens
gttgttaagcaacat

SEQ ID NO: 60510 - DNA, 15 bp, Homo sapiens
ttgttaagcaacatg

SEQ ID NO: 60511 - DNA, 15 bp, Homo sapiens
tgttaagcaacatgt

SEQ ID NO: 60512 - DNA, 15 bp, Homo sapiens
gttaagcaacatgtc

SEQ ID NO: 60513 - DNA, 15 bp, Homo sapiens
ttaagcaacatgtca

SEQ ID NO: 60514 - DNA, 15 bp, Homo sapiens
taagcaacatgtcaa

SEQ ID NO: 60515 - DNA, 15 bp, Homo sapiens
aagcaacatgtcaag

SEQ ID NO: 60516 - DNA, 15 bp, Homo sapiens
agcaacatgtcaaga

SEQ ID NO: 60517 - DNA, 15 bp, Homo sapiens
gcaacatgtcaagat

SEQ ID NO: 60518 - DNA, 15 bp, Homo sapiens
caacatgtcaagatt

SEQ ID NO: 60519 - DNA, 15 bp, Homo sapiens
aacatgtcaagattt

SEQ ID NO: 60520 - DNA, 15 bp, Homo sapiens
acatgtcaagatttt

SEQ ID NO: 60521 - DNA, 15 bp, Homo sapiens
catgtcaagattttt

SEQ ID NO: 60522 - DNA, 15 bp, Homo sapiens
atgtcaagatttttc

SEQ ID NO: 60523 - DNA, 15 bp, Homo sapiens
tgtcaagatttttca

SEQ ID NO: 60524 - DNA, 15 bp, Homo sapiens
gtcaagatttttcaa

SEQ ID NO: 60525 - DNA, 15 bp, Homo sapiens
tcaagatttttcaat

SEQ ID NO: 60526 - DNA, 15 bp, Homo sapiens
caagatttttcaatt

SEQ ID NO: 60527 - DNA, 15 bp, Homo sapiens
aagatttttcaatta

SEQ ID NO: 60528 - DNA, 15 bp, Homo sapiens
agatttttcaattat

SEQ ID NO: 60529 - DNA, 15 bp, Homo sapiens
gatttttcaattata

SEQ ID NO: 60530 - DNA, 15 bp, Homo sapiens
atttttcaattataa

SEQ ID NO: 60531 - DNA, 15 bp, Homo sapiens
tttttcaattataat

SEQ ID NO: 60532 - DNA, 15 bp, Homo sapiens
ttttcaattataatg

SEQ ID NO: 60533 - DNA, 15 bp, Homo sapiens
tttcaattataatgc

SEQ ID NO: 60534 - DNA, 15 bp, Homo sapiens
ttcaattataatgca

SEQ ID NO: 60535 - DNA, 15 bp, Homo sapiens
tcaattataatgcag

SEQ ID NO: 60536 - DNA, 15 bp, Homo sapiens
caattataatgcagg

SEQ ID NO: 60537 - DNA, 15 bp, Homo sapiens
aattataatgcaggt

SEQ ID NO: 60538 - DNA, 15 bp, Homo sapiens
attataatgcaggtt

SEQ ID NO: 60539 - DNA, 15 bp, Homo sapiens
ttataatgcaggttt

SEQ ID NO: 60540 - DNA, 15 bp, Homo sapiens
tataatgcaggtttt

SEQ ID NO: 60541 - DNA, 15 bp, Homo sapiens
ataatgcaggtttta

SEQ ID NO: 60542 - DNA, 15 bp, Homo sapiens
taatgcaggttttat

SEQ ID NO: 60543 - DNA, 15 bp, Homo sapiens
aatgcaggttttatt

SEQ ID NO: 60544 - DNA, 15 bp, Homo sapiens
atgcaggttttattg

SEQ ID NO: 60545 - DNA, 15 bp, Homo sapiens
tgcaggttttattgc

SEQ ID NO: 60546 - DNA, 15 bp, Homo sapiens
gcaggttttattgct

SEQ ID NO: 60547 - DNA, 15 bp, Homo sapiens
caggttttattgcta

SEQ ID NO: 60548 - DNA, 15 bp, Homo sapiens
aggttttattgctac

SEQ ID NO: 60549 - DNA, 15 bp, Homo sapiens
ggttttattgctact

SEQ ID NO: 60550 - DNA, 15 bp, Homo sapiens
gttttattgctactc

SEQ ID NO: 60551 - DNA, 15 bp, Homo sapiens
ttttattgctactca

SEQ ID NO: 60552 - DNA, 15 bp, Homo sapiens
tttattgctactcac

SEQ ID NO: 60553 - DNA, 15 bp, Homo sapiens
ttattgctactcacc

SEQ ID NO: 60554 - DNA, 15 bp, Homo sapiens
tattgctactcacca

SEQ ID NO: 60555 - DNA, 15 bp, Homo sapiens
attgctactcaccat

SEQ ID NO: 60556 - DNA, 15 bp, Homo sapiens
ttgctactcaccatt

SEQ ID NO: 60557 - DNA, 15 bp, Homo sapiens
tgctactcaccattg

SEQ ID NO: 60558 - DNA, 15 bp, Homo sapiens
gctactcaccattgt

SEQ ID NO: 60559 - DNA, 15 bp, Homo sapiens
ctactcaccattgtg

SEQ ID NO: 60560 - DNA, 15 bp, Homo sapiens
tactcaccattgtgc

SEQ ID NO: 60561 - DNA, 15 bp, Homo sapiens
actcaccattgtgcc

SEQ ID NO: 60562 - DNA, 15 bp, Homo sapiens
ctcaccattgtgcct

SEQ ID NO: 60563 - DNA, 15 bp, Homo sapiens
tcaccattgtgcctt

SEQ ID NO: 60564 - DNA, 15 bp, Homo sapiens
caccattgtgccttt

SEQ ID NO: 60565 - DNA, 15 bp, Homo sapiens
accattgtgcctttg

SEQ ID NO: 60566 - DNA, 15 bp, Homo sapiens
ccattgtgcctttgc

SEQ ID NO: 60567 - DNA, 15 bp, Homo sapiens
cattgtgcctttgct

SEQ ID NO: 60568 - DNA, 15 bp, Homo sapiens
attgtgcctttgctg

SEQ ID NO: 60569 - DNA, 15 bp, Homo sapiens
ttgtgcctttgctgt

SEQ ID NO: 60570 - DNA, 15 bp, Homo sapiens
tgtgcctttgctgtc

SEQ ID NO: 60571 - DNA, 15 bp, Homo sapiens
gtgcctttgctgtcc

SEQ ID NO: 60572 - DNA, 15 bp, Homo sapiens
tgcctttgctgtcct

SEQ ID NO: 60573 - DNA, 15 bp, Homo sapiens
gcctttgctgtcctg

SEQ ID NO: 60574 - DNA, 15 bp, Homo sapiens
cctttgctgtcctgg

SEQ ID NO: 60575 - DNA, 15 bp, Homo sapiens
ctttgctgtcctgga

SEQ ID NO: 60576 - DNA, 15 bp, Homo sapiens
tttgctgtcctggag

SEQ ID NO: 60577 - DNA, 15 bp, Homo sapiens
ttgctgtcctggaga

SEQ ID NO: 60578 - DNA, 15 bp, Homo sapiens
tgctgtcctggagac

SEQ ID NO: 60579 - DNA, 15 bp, Homo sapiens
gctgtcctggagact

SEQ ID NO: 60580 - DNA, 15 bp, Homo sapiens
ctgtcctggagactc

SEQ ID NO: 60581 - DNA, 15 bp, Homo sapiens
tgtcctggagactca

SEQ ID NO: 60582 - DNA, 15 bp, Homo sapiens
gtcctggagactcaa

SEQ ID NO: 60583 - DNA, 15 bp, Homo sapiens
tcctggagactcaag

SEQ ID NO: 60584 - DNA, 15 bp, Homo sapiens
cctggagactcaagt

SEQ ID NO: 60585 - DNA, 15 bp, Homo sapiens
ctggagactcaagtg

SEQ ID NO: 60586 - DNA, 15 bp, Homo sapiens
tggagactcaagtgt

SEQ ID NO: 60587 - DNA, 15 bp, Homo sapiens
ggagactcaagtgtc

SEQ ID NO: 60588 - DNA, 15 bp, Homo sapiens
gagactcaagtgtct

SEQ ID NO: 60589 - DNA, 15 bp, Homo sapiens
agactcaagtgtctt

SEQ ID NO: 60590 - DNA, 15 bp, Homo sapiens
gactcaagtgtctta

SEQ ID NO: 60591 - DNA, 15 bp, Homo sapiens
actcaagtgtcttaa

SEQ ID NO: 60592 - DNA, 15 bp, Homo sapiens
ctcaagtgtcttaaa

SEQ ID NO: 60593 - DNA, 15 bp, Homo sapiens
tcaagtgtcttaaaa

SEQ ID NO: 60594 - DNA, 15 bp, Homo sapiens
caagtgtcttaaaat

SEQ ID NO: 60595 - DNA, 15 bp, Homo sapiens
aagtgtcttaaaatc

SEQ ID NO: 60596 - DNA, 15 bp, Homo sapiens
agtgtcttaaaatct

SEQ ID NO: 60597 - DNA, 15 bp, Homo sapiens
gtgtcttaaaatctc

SEQ ID NO: 60598 - DNA, 15 bp, Homo sapiens
tgtcttaaaatctcg

SEQ ID NO: 60599 - DNA, 15 bp, Homo sapiens
gtcttaaaatctcgt

SEQ ID NO: 60600 - DNA, 15 bp, Homo sapiens
tcttaaaatctcgtc

SEQ ID NO: 60601 - DNA, 15 bp, Homo sapiens
cttaaaatctcgtct

SEQ ID NO: 60602 - DNA, 15 bp, Homo sapiens
ttaaaatctcgtctc

SEQ ID NO: 60603 - DNA, 15 bp, Homo sapiens
taaaatctcgtctcc

SEQ ID NO: 60604 - DNA, 15 bp, Homo sapiens
aaaatctcgtctccc

SEQ ID NO: 60605 - DNA, 15 bp, Homo sapiens
aaatctcgtctcccc

SEQ ID NO: 60606 - DNA, 15 bp, Homo sapiens
aatctcgtctcccca

SEQ ID NO: 60607 - DNA, 15 bp, Homo sapiens
atctcgtctccccaa

SEQ ID NO: 60608 - DNA, 15 bp, Homo sapiens
tctcgtctccccaac

SEQ ID NO: 60609 - DNA, 15 bp, Homo sapiens
ctcgtctccccaaca

SEQ ID NO: 60610 - DNA, 15 bp, Homo sapiens
tcgtctccccaacag

SEQ ID NO: 60611 - DNA, 15 bp, Homo sapiens
cgtctccccaacaga

SEQ ID NO: 60612 - DNA, 15 bp, Homo sapiens
gtctccccaacagat

SEQ ID NO: 60613 - DNA, 15 bp, Homo sapiens
tctccccaacagatg

SEQ ID NO: 60614 - DNA, 15 bp, Homo sapiens
ctccccaacagatgc

SEQ ID NO: 60615 - DNA, 15 bp, Homo sapiens
tccccaacagatgct

SEQ ID NO: 60616 - DNA, 15 bp, Homo sapiens
ccccaacagatgctg

SEQ ID NO: 60617 - DNA, 15 bp, Homo sapiens
cccaacagatgctgg

SEQ ID NO: 60618 - DNA, 15 bp, Homo sapiens
ccaacagatgctgga

SEQ ID NO: 60619 - DNA, 15 bp, Homo sapiens
caacagatgctggaa

SEQ ID NO: 60620 - DNA, 15 bp, Homo sapiens
aacagatgctggaag

SEQ ID NO: 60621 - DNA, 15 bp, Homo sapiens
acagatgctggaagg

SEQ ID NO: 60622 - DNA, 15 bp, Homo sapiens
cagatgctggaaggt

SEQ ID NO: 60623 - DNA, 15 bp, Homo sapiens
agatgctggaaggta

SEQ ID NO: 60624 - DNA, 15 bp, Homo sapiens
gatgctggaaggtaa

SEQ ID NO: 60625 - DNA, 15 bp, Homo sapiens
atgctggaaggtaat

SEQ ID NO: 60626 - DNA, 15 bp, Homo sapiens
tgctggaaggtaatg

SEQ ID NO: 60627 - DNA, 15 bp, Homo sapiens
gctggaaggtaatgt

SEQ ID NO: 60628 - DNA, 15 bp, Homo sapiens
ctggaaggtaatgtg

SEQ ID NO: 60629 - DNA, 15 bp, Homo sapiens
tggaaggtaatgtgt

SEQ ID NO: 60630 - DNA, 15 bp, Homo sapiens
ggaaggtaatgtgtc

SEQ ID NO: 60631 - DNA, 15 bp, Homo sapiens
gaaggtaatgtgtct

SEQ ID NO: 60632 - DNA, 15 bp, Homo sapiens
aaggtaatgtgtctt

SEQ ID NO: 60633 - DNA, 15 bp, Homo sapiens
aggtaatgtgtcttg

SEQ ID NO: 60634 - DNA, 15 bp, Homo sapiens
ggtaatgtgtcttgt

SEQ ID NO: 60635 - DNA, 15 bp, Homo sapiens
gtaatgtgtcttgtt

SEQ ID NO: 60636 - DNA, 15 bp, Homo sapiens
taatgtgtcttgttt

SEQ ID NO: 60637 - DNA, 15 bp, Homo sapiens
aatgtgtcttgtttg

SEQ ID NO: 60638 - DNA, 15 bp, Homo sapiens
atgtgtcttgtttga

SEQ ID NO: 60639 - DNA, 15 bp, Homo sapiens
tgtgtcttgtttgaa

SEQ ID NO: 60640 - DNA, 15 bp, Homo sapiens
gtgtcttgtttgaag

SEQ ID NO: 60641 - DNA, 15 bp, Homo sapiens
tgtcttgtttgaagt

SEQ ID NO: 60642 - DNA, 15 bp, Homo sapiens
gtcttgtttgaagtc

SEQ ID NO: 60643 - DNA, 15 bp, Homo sapiens
tcttgtttgaagtca

SEQ ID NO: 60644 - DNA, 15 bp, Homo sapiens
cttgtttgaagtcat

SEQ ID NO: 60645 - DNA, 15 bp, Homo sapiens
ttgtttgaagtcatc

SEQ ID NO: 60646 - DNA, 15 bp, Homo sapiens
tgtttgaagtcatca

SEQ ID NO: 60647 - DNA, 15 bp, Homo sapiens
gtttgaagtcatcat

SEQ ID NO: 60648 - DNA, 15 bp, Homo sapiens
tttgaagtcatcatg

SEQ ID NO: 60649 - DNA, 15 bp, Homo sapiens
ttgaagtcatcatgt

SEQ ID NO: 60650 - DNA, 15 bp, Homo sapiens
tgaagtcatcatgtg

SEQ ID NO: 60651 - DNA, 15 bp, Homo sapiens
gaagtcatcatgtga

SEQ ID NO: 60652 - DNA, 15 bp, Homo sapiens
aagtcatcatgtgag

SEQ ID NO: 60653 - DNA, 15 bp, Homo sapiens
agtcatcatgtgaga

SEQ ID NO: 60654 - DNA, 15 bp, Homo sapiens
gtcatcatgtgagaa

SEQ ID NO: 60655 - DNA, 15 bp, Homo sapiens
tcatcatgtgagaag

SEQ ID NO: 60656 - DNA, 15 bp, Homo sapiens
catcatgtgagaagt

SEQ ID NO: 60657 - DNA, 15 bp, Homo sapiens
atcatgtgagaagtt

SEQ ID NO: 60658 - DNA, 15 bp, Homo sapiens
tcatgtgagaagttc

SEQ ID NO: 60659 - DNA, 15 bp, Homo sapiens
catgtgagaagttcg

SEQ ID NO: 60660 - DNA, 15 bp, Homo sapiens
atgtgagaagttcgg

SEQ ID NO: 60661 - DNA, 15 bp, Homo sapiens
tgtgagaagttcggc

SEQ ID NO: 60662 - DNA, 15 bp, Homo sapiens
gtgagaagttcggct

SEQ ID NO: 60663 - DNA, 15 bp, Homo sapiens
tgagaagttcggctt

SEQ ID NO: 60664 - DNA, 15 bp, Homo sapiens
gagaagttcggcttt

SEQ ID NO: 60665 - DNA, 15 bp, Homo sapiens
agaagttcggctttg

SEQ ID NO: 60666 - DNA, 15 bp, Homo sapiens
gaagttcggctttgc

SEQ ID NO: 60667 - DNA, 15 bp, Homo sapiens
aagttcggctttgct

SEQ ID NO: 60668 - DNA, 15 bp, Homo sapiens
agttcggctttgctc

SEQ ID NO: 60669 - DNA, 15 bp, Homo sapiens
gttcggctttgctca

SEQ ID NO: 60670 - DNA, 15 bp, Homo sapiens
ttcggctttgctcag

SEQ ID NO: 60671 - DNA, 15 bp, Homo sapiens
tcggctttgctcagt

SEQ ID NO: 60672 - DNA, 15 bp, Homo sapiens
cggctttgctcagtg

SEQ ID NO: 60673 - DNA, 15 bp, Homo sapiens
ggctttgctcagtgg

SEQ ID NO: 60674 - DNA, 15 bp, Homo sapiens
gctttgctcagtgga

SEQ ID NO: 60675 - DNA, 15 bp, Homo sapiens
ctttgctcagtggat

SEQ ID NO: 60676 - DNA, 15 bp, Homo sapiens
tttgctcagtggatc

SEQ ID NO: 60677 - DNA, 15 bp, Homo sapiens
ttgctcagtggatcg

SEQ ID NO: 60678 - DNA, 15 bp, Homo sapiens
tgctcagtggatcgc

SEQ ID NO: 60679 - DNA, 15 bp, Homo sapiens
gctcagtggatcgcc

SEQ ID NO: 60680 - DNA, 15 bp, Homo sapiens
ctcagtggatcgccc

SEQ ID NO: 60681 - DNA, 15 bp, Homo sapiens
tcagtggatcgccca

SEQ ID NO: 60682 - DNA, 15 bp, Homo sapiens
cagtggatcgcccac

SEQ ID NO: 60683 - DNA, 15 bp, Homo sapiens
agtggatcgcccacc

SEQ ID NO: 60684 - DNA, 15 bp, Homo sapiens
gtggatcgcccacca

SEQ ID NO: 60685 - DNA, 15 bp, Homo sapiens
tggatcgcccaccac

SEQ ID NO: 60686 - DNA, 15 bp, Homo sapiens
ggatcgcccaccact

SEQ ID NO: 60687 - DNA, 15 bp, Homo sapiens
gatcgcccaccactt

SEQ ID NO: 60688 - DNA, 15 bp, Homo sapiens
atcgcccaccacttg

SEQ ID NO: 60689 - DNA, 15 bp, Homo sapiens
tcgcccaccacttgg

SEQ ID NO: 60690 - DNA, 15 bp, Homo sapiens
cgcccaccacttggt

SEQ ID NO: 60691 - DNA, 15 bp, Homo sapiens
gcccaccacttggtg

SEQ ID NO: 60692 - DNA, 15 bp, Homo sapiens
cccaccacttggtgt

SEQ ID NO: 60693 - DNA, 15 bp, Homo sapiens
ccaccacttggtgtg

SEQ ID NO: 60694 - DNA, 15 bp, Homo sapiens
caccacttggtgtga

SEQ ID NO: 60695 - DNA, 15 bp, Homo sapiens
accacttggtgtgac

SEQ ID NO: 60696 - DNA, 15 bp, Homo sapiens
ccacttggtgtgact

SEQ ID NO: 60697 - DNA, 15 bp, Homo sapiens
cacttggtgtgactt

SEQ ID NO: 60698 - DNA, 15 bp, Homo sapiens
acttggtgtgactta

SEQ ID NO: 60699 - DNA, 15 bp, Homo sapiens
cttggtgtgacttat

SEQ ID NO: 60700 - DNA, 15 bp, Homo sapiens
ttggtgtgacttatg

SEQ ID NO: 60701 - DNA, 15 bp, Homo sapiens
tggtgtgacttatga

SEQ ID NO: 60702 - DNA, 15 bp, Homo sapiens
ggtgtgacttatgaa

SEQ ID NO: 60703 - DNA, 15 bp, Homo sapiens
gtgtgacttatgaat

SEQ ID NO: 60704 - DNA, 15 bp, Homo sapiens
tgtgacttatgaatc

SEQ ID NO: 60705 - DNA, 15 bp, Homo sapiens
gtgacttatgaatct

SEQ ID NO: 60706 - DNA, 15 bp, Homo sapiens
tgacttatgaatcta

SEQ ID NO: 60707 - DNA, 15 bp, Homo sapiens
gacttatgaatctaa

SEQ ID NO: 60708 - DNA, 15 bp, Homo sapiens
acttatgaatctaat

SEQ ID NO: 60709 - DNA, 15 bp, Homo sapiens
cttatgaatctaata

SEQ ID NO: 60710 - DNA, 15 bp, Homo sapiens
ttatgaatctaataa

SEQ ID NO: 60711 - DNA, 15 bp, Homo sapiens
tatgaatctaataac

SEQ ID NO: 60712 - DNA, 15 bp, Homo sapiens
atgaatctaataacc

SEQ ID NO: 60713 - DNA, 15 bp, Homo sapiens
tgaatctaataaccc

SEQ ID NO: 60714 - DNA, 15 bp, Homo sapiens
gaatctaataaccct

SEQ ID NO: 60715 - DNA, 15 bp, Homo sapiens
aatctaataaccctt

SEQ ID NO: 60716 - DNA, 15 bp, Homo sapiens
atctaataacccttt

SEQ ID NO: 60717 - DNA, 15 bp, Homo sapiens
tctaataaccctttg

SEQ ID NO: 60718 - DNA, 15 bp, Homo sapiens
ctaataaccctttgc

SEQ ID NO: 60719 - DNA, 15 bp, Homo sapiens
taataaccctttgca

SEQ ID NO: 60720 - DNA, 15 bp, Homo sapiens
aataaccctttgcaa

SEQ ID NO: 60721 - DNA, 15 bp, Homo sapiens
ataaccctttgcaat

SEQ ID NO: 60722 - DNA, 15 bp, Homo sapiens
taaccctttgcaata

SEQ ID NO: 60723 - DNA, 15 bp, Homo sapiens
aaccctttgcaatat

SEQ ID NO: 60724 - DNA, 15 bp, Homo sapiens
accctttgcaatatc

SEQ ID NO: 60725 - DNA, 15 bp, Homo sapiens
ccctttgcaatatcc

SEQ ID NO: 60726 - DNA, 15 bp, Homo sapiens
cctttgcaatatccg

SEQ ID NO: 60727 - DNA, 15 bp, Homo sapiens
ctttgcaatatccgc

SEQ ID NO: 60728 - DNA, 15 bp, Homo sapiens
tttgcaatatccgca

SEQ ID NO: 60729 - DNA, 15 bp, Homo sapiens
ttgcaatatccgcaa

SEQ ID NO: 60730 - DNA, 15 bp, Homo sapiens
tgcaatatccgcaag

SEQ ID NO: 60731 - DNA, 15 bp, Homo sapiens
gcaatatccgcaagc

SEQ ID NO: 60732 - DNA, 15 bp, Homo sapiens
caatatccgcaagct

SEQ ID NO: 60733 - DNA, 15 bp, Homo sapiens
aatatccgcaagctt

SEQ ID NO: 60734 - DNA, 15 bp, Homo sapiens
atatccgcaagctta

SEQ ID NO: 60735 - DNA, 15 bp, Homo sapiens
tatccgcaagcttaa

SEQ ID NO: 60736 - DNA, 15 bp, Homo sapiens
atccgcaagcttaaa

SEQ ID NO: 60737 - DNA, 15 bp, Homo sapiens
tccgcaagcttaaac

SEQ ID NO: 60738 - DNA, 15 bp, Homo sapiens
ccgcaagcttaaact

SEQ ID NO: 60739 - DNA, 15 bp, Homo sapiens
cgcaagcttaaactc

SEQ ID NO: 60740 - DNA, 15 bp, Homo sapiens
gcaagcttaaactct

SEQ ID NO: 60741 - DNA, 15 bp, Homo sapiens
caagcttaaactctc

SEQ ID NO: 60742 - DNA, 15 bp, Homo sapiens
aagcttaaactctca

SEQ ID NO: 60743 - DNA, 15 bp, Homo sapiens
agcttaaactctcaa

SEQ ID NO: 60744 - DNA, 15 bp, Homo sapiens
gcttaaactctcaac

SEQ ID NO: 60745 - DNA, 15 bp, Homo sapiens
cttaaactctcaacc

SEQ ID NO: 60746 - DNA, 15 bp, Homo sapiens
ttaaactctcaacca

SEQ ID NO: 60747 - DNA, 15 bp, Homo sapiens
taaactctcaaccac

SEQ ID NO: 60748 - DNA, 15 bp, Homo sapiens
aaactctcaaccacc

SEQ ID NO: 60749 - DNA, 15 bp, Homo sapiens
aactctcaaccacct

SEQ ID NO: 60750 - DNA, 15 bp, Homo sapiens
actctcaaccacctt

SEQ ID NO: 60751 - DNA, 15 bp, Homo sapiens
ctctcaaccaccttg

SEQ ID NO: 60752 - DNA, 15 bp, Homo sapiens
tctcaaccaccttgg

SEQ ID NO: 60753 - DNA, 15 bp, Homo sapiens
ctcaaccaccttggc

SEQ ID NO: 60754 - DNA, 15 bp, Homo sapiens
tcaaccaccttggcg

SEQ ID NO: 60755 - DNA, 15 bp, Homo sapiens
caaccaccttggcga

SEQ ID NO: 60756 - DNA, 15 bp, Homo sapiens
aaccaccttggcgac

SEQ ID NO: 60757 - DNA, 15 bp, Homo sapiens
accaccttggcgact

SEQ ID NO: 60758 - DNA, 15 bp, Homo sapiens
ccaccttggcgacta

SEQ ID NO: 60759 - DNA, 15 bp, Homo sapiens
caccttggcgactac

SEQ ID NO: 60760 - DNA, 15 bp, Homo sapiens
accttggcgactaca

SEQ ID NO: 60761 - DNA, 15 bp, Homo sapiens
ccttggcgactacag

SEQ ID NO: 60762 - DNA, 15 bp, Homo sapiens
cttggcgactacaga

SEQ ID NO: 60763 - DNA, 15 bp, Homo sapiens
ttggcgactacagaa

SEQ ID NO: 60764 - DNA, 15 bp, Homo sapiens
tggcgactacagaag

SEQ ID NO: 60765 - DNA, 15 bp, Homo sapiens
ggcgactacagaaga

SEQ ID NO: 60766 - DNA, 15 bp, Homo sapiens
gcgactacagaagac

SEQ ID NO: 60767 - DNA, 15 bp, Homo sapiens
cgactacagaagaca

SEQ ID NO: 60768 - DNA, 15 bp, Homo sapiens
gactacagaagacaa

SEQ ID NO: 60769 - DNA, 15 bp, Homo sapiens
actacagaagacaaa

SEQ ID NO: 60770 - DNA, 15 bp, Homo sapiens
ctacagaagacaaag

SEQ ID NO: 60771 - DNA, 15 bp, Homo sapiens
tacagaagacaaagc

SEQ ID NO: 60772 - DNA, 15 bp, Homo sapiens
acagaagacaaagca

SEQ ID NO: 60773 - DNA, 15 bp, Homo sapiens
cagaagacaaagcaa

SEQ ID NO: 60774 - DNA, 15 bp, Homo sapiens
agaagacaaagcaac

SEQ ID NO: 60775 - DNA, 15 bp, Homo sapiens
gaagacaaagcaact

SEQ ID NO: 60776 - DNA, 15 bp, Homo sapiens
aagacaaagcaactg

SEQ ID NO: 60777 - DNA, 15 bp, Homo sapiens
agacaaagcaactgg

SEQ ID NO: 60778 - DNA, 15 bp, Homo sapiens
gacaaagcaactggc

SEQ ID NO: 60779 - DNA, 15 bp, Homo sapiens
acaaagcaactggca

SEQ ID NO: 60780 - DNA, 15 bp, Homo sapiens
caaagcaactggcat

SEQ ID NO: 60781 - DNA, 15 bp, Homo sapiens
aaagcaactggcatc

SEQ ID NO: 60782 - DNA, 15 bp, Homo sapiens
aagcaactggcatcg

SEQ ID NO: 60783 - DNA, 15 bp, Homo sapiens
agcaactggcatcga

SEQ ID NO: 60784 - DNA, 15 bp, Homo sapiens
gcaactggcatcgat

SEQ ID NO: 60785 - DNA, 15 bp, Homo sapiens
caactggcatcgatg

SEQ ID NO: 60786 - DNA, 15 bp, Homo sapiens
aactggcatcgatgt

SEQ ID NO: 60787 - DNA, 15 bp, Homo sapiens
actggcatcgatgtc

SEQ ID NO: 60788 - DNA, 15 bp, Homo sapiens
ctggcatcgatgtcg

SEQ ID NO: 60789 - DNA, 15 bp, Homo sapiens
tggcatcgatgtcga

SEQ ID NO: 60790 - DNA, 15 bp, Homo sapiens
ggcatcgatgtcgaa

SEQ ID NO: 60791 - DNA, 15 bp, Homo sapiens
gcatcgatgtcgaaa

SEQ ID NO: 60792 - DNA, 15 bp, Homo sapiens
catcgatgtcgaaaa

SEQ ID NO: 60793 - DNA, 15 bp, Homo sapiens
atcgatgtcgaaaaa

SEQ ID NO: 60794 - DNA, 15 bp, Homo sapiens
tcgatgtcgaaaaac

SEQ ID NO: 60795 - DNA, 15 bp, Homo sapiens
cgatgtcgaaaaacc

SEQ ID NO: 60796 - DNA, 15 bp, Homo sapiens
gatgtcgaaaaacct

SEQ ID NO: 60797 - DNA, 15 bp, Homo sapiens
atgtcgaaaaaccta

SEQ ID NO: 60798 - DNA, 15 bp, Homo sapiens
tgtcgaaaaacctat

SEQ ID NO: 60799 - DNA, 15 bp, Homo sapiens
gtcgaaaaacctata

SEQ ID NO: 60800 - DNA, 15 bp, Homo sapiens
tcgaaaaacctatag

SEQ ID NO: 60801 - DNA, 15 bp, Homo sapiens
cgaaaaacctataga

SEQ ID NO: 60802 - DNA, 15 bp, Homo sapiens
gaaaaacctatagat

SEQ ID NO: 60803 - DNA, 15 bp, Homo sapiens
aaaaacctatagatt

SEQ ID NO: 60804 - DNA, 15 bp, Homo sapiens
aaaacctatagattt

SEQ ID NO: 60805 - DNA, 15 bp, Homo sapiens
aaacctatagattta

SEQ ID NO: 60806 - DNA, 15 bp, Homo sapiens
aacctatagatttac

SEQ ID NO: 60807 - DNA, 15 bp, Homo sapiens
acctatagatttacg

SEQ ID NO: 60808 - DNA, 15 bp, Homo sapiens
cctatagatttacgc

SEQ ID NO: 60809 - DNA, 15 bp, Homo sapiens
ctatagatttacgca

SEQ ID NO: 60810 - DNA, 15 bp, Homo sapiens
tatagatttacgcaa

SEQ ID NO: 60811 - DNA, 15 bp, Homo sapiens
atagatttacgcaaa

SEQ ID NO: 60812 - DNA, 15 bp, Homo sapiens
tagatttacgcaaac

SEQ ID NO: 60813 - DNA, 15 bp, Homo sapiens
agatttacgcaaacg

SEQ ID NO: 60814 - DNA, 15 bp, Homo sapiens
gatttacgcaaacgc

SEQ ID NO: 60815 - DNA, 15 bp, Homo sapiens
atttacgcaaacgcc

SEQ ID NO: 60816 - DNA, 15 bp, Homo sapiens
tttacgcaaacgccc

SEQ ID NO: 60817 - DNA, 15 bp, Homo sapiens
ttacgcaaacgccct

SEQ ID NO: 60818 - DNA, 15 bp, Homo sapiens
tacgcaaacgccctc

SEQ ID NO: 60819 - DNA, 15 bp, Homo sapiens
acgcaaacgccctca

SEQ ID NO: 60820 - DNA, 15 bp, Homo sapiens
cgcaaacgccctcac

SEQ ID NO: 60821 - DNA, 15 bp, Homo sapiens
gcaaacgccctcact

SEQ ID NO: 60822 - DNA, 15 bp, Homo sapiens
caaacgccctcactc

SEQ ID NO: 60823 - DNA, 15 bp, Homo sapiens
aaacgccctcactcc

SEQ ID NO: 60824 - DNA, 15 bp, Homo sapiens
aacgccctcactccg

SEQ ID NO: 60825 - DNA, 15 bp, Homo sapiens
acgccctcactccga

SEQ ID NO: 60826 - DNA, 15 bp, Homo sapiens
cgccctcactccgag

SEQ ID NO: 60827 - DNA, 15 bp, Homo sapiens
gccctcactccgaga

SEQ ID NO: 60828 - DNA, 15 bp, Homo sapiens
ccctcactccgagag

SEQ ID NO: 60829 - DNA, 15 bp, Homo sapiens
cctcactccgagaga

SEQ ID NO: 60830 - DNA, 15 bp, Homo sapiens
ctcactccgagagac

SEQ ID NO: 60831 - DNA, 15 bp, Homo sapiens
tcactccgagagaca

SEQ ID NO: 60832 - DNA, 15 bp, Homo sapiens
cactccgagagacac

SEQ ID NO: 60833 - DNA, 15 bp, Homo sapiens
actccgagagacacg

SEQ ID NO: 60834 - DNA, 15 bp, Homo sapiens
ctccgagagacacgt

SEQ ID NO: 60835 - DNA, 15 bp, Homo sapiens
tccgagagacacgtt

SEQ ID NO: 60836 - DNA, 15 bp, Homo sapiens
ccgagagacacgttt

SEQ ID NO: 60837 - DNA, 15 bp, Homo sapiens
cgagagacacgtttc

SEQ ID NO: 60838 - DNA, 15 bp, Homo sapiens
gagagacacgtttcc

SEQ ID NO: 60839 - DNA, 15 bp, Homo sapiens
agagacacgtttcct

SEQ ID NO: 60840 - DNA, 15 bp, Homo sapiens
gagacacgtttcctt

SEQ ID NO: 60841 - DNA, 15 bp, Homo sapiens
agacacgtttccttt

SEQ ID NO: 60842 - DNA, 15 bp, Homo sapiens
gacacgtttcctttt

SEQ ID NO: 60843 - DNA, 15 bp, Homo sapiens
acacgtttccttttg

SEQ ID NO: 60844 - DNA, 15 bp, Homo sapiens
cacgtttccttttga

SEQ ID NO: 60845 - DNA, 15 bp, Homo sapiens
acgtttccttttgag

SEQ ID NO: 60846 - DNA, 15 bp, Homo sapiens
cgtttccttttgagt

SEQ ID NO: 60847 - DNA, 15 bp, Homo sapiens
gtttccttttgagtt

SEQ ID NO: 60848 - DNA, 15 bp, Homo sapiens
tttccttttgagttc

SEQ ID NO: 60849 - DNA, 15 bp, Homo sapiens
ttccttttgagttct

SEQ ID NO: 60850 - DNA, 15 bp, Homo sapiens
tccttttgagttctt

SEQ ID NO: 60851 - DNA, 15 bp, Homo sapiens
ccttttgagttctta

SEQ ID NO: 60852 - DNA, 15 bp, Homo sapiens
cttttgagttcttac

SEQ ID NO: 60853 - DNA, 15 bp, Homo sapiens
ttttgagttcttacg

SEQ ID NO: 60854 - DNA, 15 bp, Homo sapiens
tttgagttcttacgt

SEQ ID NO: 60855 - DNA, 15 bp, Homo sapiens
ttgagttcttacgtg

SEQ ID NO: 60856 - DNA, 15 bp, Homo sapiens
tgagttcttacgtga

SEQ ID NO: 60857 - DNA, 15 bp, Homo sapiens
gagttcttacgtgat

SEQ ID NO: 60858 - DNA, 15 bp, Homo sapiens
agttcttacgtgatt

SEQ ID NO: 60859 - DNA, 15 bp, Homo sapiens
gttcttacgtgattc

SEQ ID NO: 60860 - DNA, 15 bp, Homo sapiens
ttcttacgtgattct

SEQ ID NO: 60861 - DNA, 15 bp, Homo sapiens
tcttacgtgattcta

SEQ ID NO: 60862 - DNA, 15 bp, Homo sapiens
cttacgtgattctaa

SEQ ID NO: 60863 - DNA, 15 bp, Homo sapiens
ttacgtgattctaat

SEQ ID NO: 60864 - DNA, 15 bp, Homo sapiens
tacgtgattctaatg

SEQ ID NO: 60865 - DNA, 15 bp, Homo sapiens
acgtgattctaatga

SEQ ID NO: 60866 - DNA, 15 bp, Homo sapiens
cgtgattctaatgaa

SEQ ID NO: 60867 - DNA, 15 bp, Homo sapiens
gtgattctaatgaat

SEQ ID NO: 60868 - DNA, 15 bp, Homo sapiens
tgattctaatgaatg

SEQ ID NO: 60869 - DNA, 15 bp, Homo sapiens
gattctaatgaatga

SEQ ID NO: 60870 - DNA, 15 bp, Homo sapiens
attctaatgaatgag

SEQ ID NO: 60871 - DNA, 15 bp, Homo sapiens
ttctaatgaatgagc

SEQ ID NO: 60872 - DNA, 15 bp, Homo sapiens
tctaatgaatgagcg

SEQ ID NO: 60873 - DNA, 15 bp, Homo sapiens
ctaatgaatgagcga

SEQ ID NO: 60874 - DNA, 15 bp, Homo sapiens
taatgaatgagcgag

SEQ ID NO: 60875 - DNA, 15 bp, Homo sapiens
aatgaatgagcgagg

SEQ ID NO: 60876 - DNA, 15 bp, Homo sapiens
atgaatgagcgaggt

SEQ ID NO: 60877 - DNA, 15 bp, Homo sapiens
tgaatgagcgaggtt

SEQ ID NO: 60878 - DNA, 15 bp, Homo sapiens
gaatgagcgaggtta

SEQ ID NO: 60879 - DNA, 15 bp, Homo sapiens
aatgagcgaggttac

SEQ ID NO: 60880 - DNA, 15 bp, Homo sapiens
atgagcgaggttacc

SEQ ID NO: 60881 - DNA, 15 bp, Homo sapiens
tgagcgaggttacca

SEQ ID NO: 60882 - DNA, 15 bp, Homo sapiens
gagcgaggttaccaa

SEQ ID NO: 60883 - DNA, 15 bp, Homo sapiens
agcgaggttaccaat

SEQ ID NO: 60884 - DNA, 15 bp, Homo sapiens
gcgaggttaccaatg

SEQ ID NO: 60885 - DNA, 15 bp, Homo sapiens
cgaggttaccaatga

SEQ ID NO: 60886 - DNA, 15 bp, Homo sapiens
gaggttaccaatgat

SEQ ID NO: 60887 - DNA, 15 bp, Homo sapiens
aggttaccaatgatt

SEQ ID NO: 60888 - DNA, 15 bp, Homo sapiens
ggttaccaatgattg

SEQ ID NO: 60889 - DNA, 15 bp, Homo sapiens
gttaccaatgattgc

SEQ ID NO: 60890 - DNA, 15 bp, Homo sapiens
ttaccaatgattgcc

SEQ ID NO: 60891 - DNA, 15 bp, Homo sapiens
taccaatgattgccc

SEQ ID NO: 60892 - DNA, 15 bp, Homo sapiens
accaatgattgccca

SEQ ID NO: 60893 - DNA, 15 bp, Homo sapiens
ccaatgattgcccaa

SEQ ID NO: 60894 - DNA, 15 bp, Homo sapiens
caatgattgcccaac

SEQ ID NO: 60895 - DNA, 15 bp, Homo sapiens
aatgattgcccaact

SEQ ID NO: 60896 - DNA, 15 bp, Homo sapiens
atgattgcccaactg

SEQ ID NO: 60897 - DNA, 15 bp, Homo sapiens
tgattgcccaactgc

SEQ ID NO: 60898 - DNA, 15 bp, Homo sapiens
gattgcccaactgcc

SEQ ID NO: 60899 - DNA, 15 bp, Homo sapiens
attgcccaactgccc

SEQ ID NO: 60900 - DNA, 15 bp, Homo sapiens
ttgcccaactgccct

SEQ ID NO: 60901 - DNA, 15 bp, Homo sapiens
tgcccaactgccctg

SEQ ID NO: 60902 - DNA, 15 bp, Homo sapiens
gcccaactgccctgc

SEQ ID NO: 60903 - DNA, 15 bp, Homo sapiens
cccaactgccctgct

SEQ ID NO: 60904 - DNA, 15 bp, Homo sapiens
ccaactgccctgcta

SEQ ID NO: 60905 - DNA, 15 bp, Homo sapiens
caactgccctgctat

SEQ ID NO: 60906 - DNA, 15 bp, Homo sapiens
aactgccctgctatg

SEQ ID NO: 60907 - DNA, 15 bp, Homo sapiens
actgccctgctatgt

SEQ ID NO: 60908 - DNA, 15 bp, Homo sapiens
ctgccctgctatgta

SEQ ID NO: 60909 - DNA, 15 bp, Homo sapiens
tgccctgctatgtag

SEQ ID NO: 60910 - DNA, 15 bp, Homo sapiens
gccctgctatgtagc

SEQ ID NO: 60911 - DNA, 15 bp, Homo sapiens
ccctgctatgtagca

SEQ ID NO: 60912 - DNA, 15 bp, Homo sapiens
cctgctatgtagcag

SEQ ID NO: 60913 - DNA, 15 bp, Homo sapiens
ctgctatgtagcagg

SEQ ID NO: 60914 - DNA, 15 bp, Homo sapiens
tgctatgtagcaggt

SEQ ID NO: 60915 - DNA, 15 bp, Homo sapiens
gctatgtagcaggtg

SEQ ID NO: 60916 - DNA, 15 bp, Homo sapiens
ctatgtagcaggtgt

SEQ ID NO: 60917 - DNA, 15 bp, Homo sapiens
tatgtagcaggtgtt

SEQ ID NO: 60918 - DNA, 15 bp, Homo sapiens
atgtagcaggtgttt

SEQ ID NO: 60919 - DNA, 15 bp, Homo sapiens
tgtagcaggtgtttc

SEQ ID NO: 60920 - DNA, 15 bp, Homo sapiens
gtagcaggtgtttcc

SEQ ID NO: 60921 - DNA, 15 bp, Homo sapiens
tagcaggtgtttcct

SEQ ID NO: 60922 - DNA, 15 bp, Homo sapiens
agcaggtgtttccta

SEQ ID NO: 60923 - DNA, 15 bp, Homo sapiens
gcaggtgtttcctag

SEQ ID NO: 60924 - DNA, 15 bp, Homo sapiens
caggtgtttcctagg

SEQ ID NO: 60925 - DNA, 15 bp, Homo sapiens
aggtgtttcctaggg

SEQ ID NO: 60926 - DNA, 15 bp, Homo sapiens
ggtgtttcctagggc

SEQ ID NO: 60927 - DNA, 15 bp, Homo sapiens
gtgtttcctagggct

SEQ ID NO: 60928 - DNA, 15 bp, Homo sapiens
tgtttcctagggctg

SEQ ID NO: 60929 - DNA, 15 bp, Homo sapiens
gtttcctagggctgc

SEQ ID NO: 60930 - DNA, 15 bp, Homo sapiens
tttcctagggctgcc

SEQ ID NO: 60931 - DNA, 15 bp, Homo sapiens
ttcctagggctgcct

SEQ ID NO: 60932 - DNA, 15 bp, Homo sapiens
tcctagggctgcctt

SEQ ID NO: 60933 - DNA, 15 bp, Homo sapiens
cctagggctgccttc

SEQ ID NO: 60934 - DNA, 15 bp, Homo sapiens
ctagggctgccttct

SEQ ID NO: 60935 - DNA, 15 bp, Homo sapiens
tagggctgccttcta

SEQ ID NO: 60936 - DNA, 15 bp, Homo sapiens
agggctgccttctaa

SEQ ID NO: 60937 - DNA, 15 bp, Homo sapiens
gggctgccttctaac

SEQ ID NO: 60938 - DNA, 15 bp, Homo sapiens
ggctgccttctaacc

SEQ ID NO: 60939 - DNA, 15 bp, Homo sapiens
gctgccttctaaccg

SEQ ID NO: 60940 - DNA, 15 bp, Homo sapiens
ctgccttctaaccgc

SEQ ID NO: 60941 - DNA, 15 bp, Homo sapiens
tgccttctaaccgcc

SEQ ID NO: 60942 - DNA, 15 bp, Homo sapiens
gccttctaaccgccc

SEQ ID NO: 60943 - DNA, 15 bp, Homo sapiens
ccttctaaccgcccg

SEQ ID NO: 60944 - DNA, 15 bp, Homo sapiens
cttctaaccgcccgt

SEQ ID NO: 60945 - DNA, 15 bp, Homo sapiens
ttctaaccgcccgtt

SEQ ID NO: 60946 - DNA, 15 bp, Homo sapiens
tctaaccgcccgtta

SEQ ID NO: 60947 - DNA, 15 bp, Homo sapiens
ctaaccgcccgttac

SEQ ID NO: 60948 - DNA, 15 bp, Homo sapiens
taaccgcccgttact

SEQ ID NO: 60949 - DNA, 15 bp, Homo sapiens
aaccgcccgttactg

SEQ ID NO: 60950 - DNA, 15 bp, Homo sapiens
accgcccgttactgg

SEQ ID NO: 60951 - DNA, 15 bp, Homo sapiens
ccgcccgttactggg

SEQ ID NO: 60952 - DNA, 15 bp, Homo sapiens
cgcccgttactgggt

SEQ ID NO: 60953 - DNA, 15 bp, Homo sapiens
gcccgttactgggtc

SEQ ID NO: 60954 - DNA, 15 bp, Homo sapiens
cccgttactgggtcc

SEQ ID NO: 60955 - DNA, 15 bp, Homo sapiens
ccgttactgggtcct

SEQ ID NO: 60956 - DNA, 15 bp, Homo sapiens
cgttactgggtcctg

SEQ ID NO: 60957 - DNA, 15 bp, Homo sapiens
gttactgggtcctgg

SEQ ID NO: 60958 - DNA, 15 bp, Homo sapiens
ttactgggtcctggc

SEQ ID NO: 60959 - DNA, 15 bp, Homo sapiens
tactgggtcctggca

SEQ ID NO: 60960 - DNA, 15 bp, Homo sapiens
actgggtcctggcac

SEQ ID NO: 60961 - DNA, 15 bp, Homo sapiens
ctgggtcctggcact

SEQ ID NO: 60962 - DNA, 15 bp, Homo sapiens
tgggtcctggcactg

SEQ ID NO: 60963 - DNA, 15 bp, Homo sapiens
gggtcctggcactga

SEQ ID NO: 60964 - DNA, 15 bp, Homo sapiens
ggtcctggcactgaa

SEQ ID NO: 60965 - DNA, 15 bp, Homo sapiens
gtcctggcactgaaa

SEQ ID NO: 60966 - DNA, 15 bp, Homo sapiens
tcctggcactgaaag

SEQ ID NO: 60967 - DNA, 15 bp, Homo sapiens
cctggcactgaaagt

SEQ ID NO: 60968 - DNA, 15 bp, Homo sapiens
ctggcactgaaagtt

SEQ ID NO: 60969 - DNA, 15 bp, Homo sapiens
tggcactgaaagttc

SEQ ID NO: 60970 - DNA, 15 bp, Homo sapiens
ggcactgaaagttcc

SEQ ID NO: 60971 - DNA, 15 bp, Homo sapiens
gcactgaaagttccc

SEQ ID NO: 60972 - DNA, 15 bp, Homo sapiens
cactgaaagttccca

SEQ ID NO: 60973 - DNA, 15 bp, Homo sapiens
actgaaagttcccag

SEQ ID NO: 60974 - DNA, 15 bp, Homo sapiens
ctgaaagttcccaga

SEQ ID NO: 60975 - DNA, 15 bp, Homo sapiens
tgaaagttcccagag

SEQ ID NO: 60976 - DNA, 15 bp, Homo sapiens
gaaagttcccagaga

SEQ ID NO: 60977 - DNA, 15 bp, Homo sapiens
aaagttcccagagaa

SEQ ID NO: 60978 - DNA, 15 bp, Homo sapiens
aagttcccagagaaa

SEQ ID NO: 60979 - DNA, 15 bp, Homo sapiens
agttcccagagaaag

SEQ ID NO: 60980 - DNA, 15 bp, Homo sapiens
gttcccagagaaagt

SEQ ID NO: 60981 - DNA, 15 bp, Homo sapiens
ttcccagagaaagtg

SEQ ID NO: 60982 - DNA, 15 bp, Homo sapiens
tcccagagaaagtga

SEQ ID NO: 60983 - DNA, 15 bp, Homo sapiens
cccagagaaagtgag

SEQ ID NO: 60984 - DNA, 15 bp, Homo sapiens
ccagagaaagtgagg

SEQ ID NO: 60985 - DNA, 15 bp, Homo sapiens
cagagaaagtgagga

SEQ ID NO: 60986 - DNA, 15 bp, Homo sapiens
agagaaagtgaggag

SEQ ID NO: 60987 - DNA, 15 bp, Homo sapiens
gagaaagtgaggagt

SEQ ID NO: 60988 - DNA, 15 bp, Homo sapiens
agaaagtgaggagtt

SEQ ID NO: 60989 - DNA, 15 bp, Homo sapiens
gaaagtgaggagttt

SEQ ID NO: 60990 - DNA, 15 bp, Homo sapiens
aaagtgaggagtttc

SEQ ID NO: 60991 - DNA, 15 bp, Homo sapiens
aagtgaggagtttca

SEQ ID NO: 60992 - DNA, 15 bp, Homo sapiens
agtgaggagtttcag

SEQ ID NO: 60993 - DNA, 15 bp, Homo sapiens
gtgaggagtttcagg

SEQ ID NO: 60994 - DNA, 15 bp, Homo sapiens
tgaggagtttcaggg

SEQ ID NO: 60995 - DNA, 15 bp, Homo sapiens
gaggagtttcagggt

SEQ ID NO: 60996 - DNA, 15 bp, Homo sapiens
aggagtttcagggta

SEQ ID NO: 60997 - DNA, 15 bp, Homo sapiens
ggagtttcagggtac

SEQ ID NO: 60998 - DNA, 15 bp, Homo sapiens
gagtttcagggtacc

SEQ ID NO: 60999 - DNA, 15 bp, Homo sapiens
agtttcagggtaccc

SEQ ID NO: 61000 - DNA, 15 bp, Homo sapiens
gtttcagggtacccc

SEQ ID NO: 61001 - DNA, 15 bp, Homo sapiens
tttcagggtacccct

SEQ ID NO: 61002 - DNA, 15 bp, Homo sapiens
ttcagggtacccctg

SEQ ID NO: 61003 - DNA, 15 bp, Homo sapiens
tcagggtacccctgt

SEQ ID NO: 61004 - DNA, 15 bp, Homo sapiens
cagggtacccctgta

SEQ ID NO: 61005 - DNA, 15 bp, Homo sapiens
agggtacccctgtaa

SEQ ID NO: 61006 - DNA, 15 bp, Homo sapiens
gggtacccctgtaaa

SEQ ID NO: 61007 - DNA, 15 bp, Homo sapiens
ggtacccctgtaaaa

SEQ ID NO: 61008 - DNA, 15 bp, Homo sapiens
gtacccctgtaaaaa

SEQ ID NO: 61009 - DNA, 15 bp, Homo sapiens
tacccctgtaaaaaa

SEQ ID NO: 61010 - DNA, 15 bp, Homo sapiens
acccctgtaaaaaaa

SEQ ID NO: 61011 - DNA, 15 bp, Homo sapiens
cccctgtaaaaaaaa

SEQ ID NO: 61012 - DNA, 15 bp, Homo sapiens
ccctgtaaaaaaaaa

SEQ ID NO: 61013 - DNA, 15 bp, Homo sapiens
cctgtaaaaaaaaaa

SEQ ID NO: 61014 - DNA, 15 bp, Homo sapiens
ctgtaaaaaaaaaaa

SEQ ID NO: 61015 - DNA, 15 bp, Homo sapiens
tgtaaaaaaaaaaac

SEQ ID NO: 61016 - DNA, 15 bp, Homo sapiens
gtaaaaaaaaaaact

SEQ ID NO: 61017 - DNA, 15 bp, Homo sapiens
taaaaaaaaaaactc

SEQ ID NO: 61018 - DNA, 15 bp, Homo sapiens
aaaaaaaaaactcag

SEQ ID NO: 61019 - DNA, 15 bp, Homo sapiens
aaaaaaaaactcagc

SEQ ID NO: 61020 - DNA, 15 bp, Homo sapiens
aaaaaaaactcagcc

SEQ ID NO: 61021 - DNA, 15 bp, Homo sapiens
aaaaaaactcagcct

SEQ ID NO: 61022 - DNA, 15 bp, Homo sapiens
aaaaaactcagcctg

SEQ ID NO: 61023 - DNA, 15 bp, Homo sapiens
aaaaactcagcctgc

SEQ ID NO: 61024 - DNA, 15 bp, Homo sapiens
aaaactcagcctgca

SEQ ID NO: 61025 - DNA, 15 bp, Homo sapiens
aaactcagcctgcac

SEQ ID NO: 61026 - DNA, 15 bp, Homo sapiens
aactcagcctgcaca

SEQ ID NO: 61027 - DNA, 15 bp, Homo sapiens
actcagcctgcacac

SEQ ID NO: 61028 - DNA, 15 bp, Homo sapiens
ctcagcctgcacacc

SEQ ID NO: 61029 - DNA, 15 bp, Homo sapiens
tcagcctgcacaccg

SEQ ID NO: 61030 - DNA, 15 bp, Homo sapiens
cagcctgcacaccgc

SEQ ID NO: 61031 - DNA, 15 bp, Homo sapiens
agcctgcacaccgct

SEQ ID NO: 61032 - DNA, 15 bp, Homo sapiens
gcctgcacaccgctc

SEQ ID NO: 61033 - DNA, 15 bp, Homo sapiens
cctgcacaccgctcc

SEQ ID NO: 61034 - DNA, 15 bp, Homo sapiens
ctgcacaccgctccc

SEQ ID NO: 61035 - DNA, 15 bp, Homo sapiens
tgcacaccgctccct

SEQ ID NO: 61036 - DNA, 15 bp, Homo sapiens
gcacaccgctccctt

SEQ ID NO: 61037 - DNA, 15 bp, Homo sapiens
cacaccgctcccttg

SEQ ID NO: 61038 - DNA, 15 bp, Homo sapiens
acaccgctcccttgc

SEQ ID NO: 61039 - DNA, 15 bp, Homo sapiens
caccgctcccttgcc

SEQ ID NO: 61040 - DNA, 15 bp, Homo sapiens
accgctcccttgccc

SEQ ID NO: 61041 - DNA, 15 bp, Homo sapiens
ccgctcccttgccca

SEQ ID NO: 61042 - DNA, 15 bp, Homo sapiens
cgctcccttgcccac

SEQ ID NO: 61043 - DNA, 15 bp, Homo sapiens
gctcccttgcccact

SEQ ID NO: 61044 - DNA, 15 bp, Homo sapiens
ctcccttgcccacta

SEQ ID NO: 61045 - DNA, 15 bp, Homo sapiens
tcccttgcccactac

SEQ ID NO: 61046 - DNA, 15 bp, Homo sapiens
cccttgcccactacg

SEQ ID NO: 61047 - DNA, 15 bp, Homo sapiens
ccttgcccactacgc

SEQ ID NO: 61048 - DNA, 15 bp, Homo sapiens
cttgcccactacgca

SEQ ID NO: 61049 - DNA, 15 bp, Homo sapiens
ttgcccactacgcag

SEQ ID NO: 61050 - DNA, 15 bp, Homo sapiens
tgcccactacgcagg

SEQ ID NO: 61051 - DNA, 15 bp, Homo sapiens
gcccactacgcaggt

SEQ ID NO: 61052 - DNA, 15 bp, Homo sapiens
cccactacgcaggtc

SEQ ID NO: 61053 - DNA, 15 bp, Homo sapiens
ccactacgcaggtca

SEQ ID NO: 61054 - DNA, 15 bp, Homo sapiens
cactacgcaggtcac

SEQ ID NO: 61055 - DNA, 15 bp, Homo sapiens
actacgcaggtcaca

SEQ ID NO: 61056 - DNA, 15 bp, Homo sapiens
ctacgcaggtcacac

SEQ ID NO: 61057 - DNA, 15 bp, Homo sapiens
tacgcaggtcacacc

SEQ ID NO: 61058 - DNA, 15 bp, Homo sapiens
acgcaggtcacacct

SEQ ID NO: 61059 - DNA, 15 bp, Homo sapiens
cgcaggtcacacctg

SEQ ID NO: 61060 - DNA, 15 bp, Homo sapiens
gcaggtcacacctgg

SEQ ID NO: 61061 - DNA, 15 bp, Homo sapiens
caggtcacacctggg

SEQ ID NO: 61062 - DNA, 15 bp, Homo sapiens
aggtcacacctgggg

SEQ ID NO: 61063 - DNA, 15 bp, Homo sapiens
ggtcacacctggggc

SEQ ID NO: 61064 - DNA, 15 bp, Homo sapiens
gtcacacctggggct

SEQ ID NO: 61065 - DNA, 15 bp, Homo sapiens
tcacacctggggctc

SEQ ID NO: 61066 - DNA, 15 bp, Homo sapiens
cacacctggggctcc

SEQ ID NO: 61067 - DNA, 15 bp, Homo sapiens
acacctggggctccg

SEQ ID NO: 61068 - DNA, 15 bp, Homo sapiens
cacctggggctccgg

SEQ ID NO: 61069 - DNA, 15 bp, Homo sapiens
acctggggctccggc

SEQ ID NO: 61070 - DNA, 15 bp, Homo sapiens
cctggggctccggcg

SEQ ID NO: 61071 - DNA, 15 bp, Homo sapiens
ctggggctccggcga

SEQ ID NO: 61072 - DNA, 15 bp, Homo sapiens
tggggctccggcgaa

SEQ ID NO: 61073 - DNA, 15 bp, Homo sapiens
ggggctccggcgaag

SEQ ID NO: 61074 - DNA, 15 bp, Homo sapiens
gggctccggcgaagc

SEQ ID NO: 61075 - DNA, 15 bp, Homo sapiens
ggctccggcgaagct

SEQ ID NO: 61076 - DNA, 15 bp, Homo sapiens
gctccggcgaagctg

SEQ ID NO: 61077 - DNA, 15 bp, Homo sapiens
ctccggcgaagctga

SEQ ID NO: 61078 - DNA, 15 bp, Homo sapiens
tccggcgaagctgaa

SEQ ID NO: 61079 - DNA, 15 bp, Homo sapiens
ccggcgaagctgaat

SEQ ID NO: 61080 - DNA, 15 bp, Homo sapiens
cggcgaagctgaatt

SEQ ID NO: 61081 - DNA, 15 bp, Homo sapiens
ggcgaagctgaattc

SEQ ID NO: 61082 - DNA, 15 bp, Homo sapiens
gcgaagctgaattcg

SEQ ID NO: 61083 - DNA, 15 bp, Homo sapiens
cgaagctgaattcgg

SEQ ID NO: 61084 - DNA, 15 bp, Homo sapiens
gaagctgaattcggc

SEQ ID NO: 61085 - DNA, 15 bp, Homo sapiens
aagctgaattcggct

SEQ ID NO: 61086 - DNA, 15 bp, Homo sapiens
agctgaattcggctc

SEQ ID NO: 61087 - DNA, 15 bp, Homo sapiens
gctgaattcggctcg

SEQ ID NO: 61088 - DNA, 15 bp, Homo sapiens
ctgaattcggctcgg

SEQ ID NO: 61089 - DNA, 15 bp, Homo sapiens
tgaattcggctcggg

SEQ ID NO: 61090 - DNA, 15 bp, Homo sapiens
gaattcggctcggga

SEQ ID NO: 61091 - DNA, 15 bp, Homo sapiens
aattcggctcgggag

SEQ ID NO: 61092 - DNA, 15 bp, Homo sapiens
attcggctcgggaga

SEQ ID NO: 61093 - DNA, 15 bp, Homo sapiens
ttcggctcgggagat

SEQ ID NO: 61094 - DNA, 15 bp, Homo sapiens
tcggctcgggagatt

SEQ ID NO: 61095 - DNA, 15 bp, Homo sapiens
cggctcgggagattt

SEQ ID NO: 61096 - DNA, 15 bp, Homo sapiens
ggctcgggagatttc

SEQ ID NO: 61097 - DNA, 15 bp, Homo sapiens
gctcgggagatttcc

SEQ ID NO: 61098 - DNA, 15 bp, Homo sapiens
ctcgggagatttccc

SEQ ID NO: 61099 - DNA, 15 bp, Homo sapiens
tcgggagatttccct

SEQ ID NO: 61100 - DNA, 15 bp, Homo sapiens
cgggagatttccctg

SEQ ID NO: 61101 - DNA, 15 bp, Homo sapiens
gggagatttccctgt

SEQ ID NO: 61102 - DNA, 15 bp, Homo sapiens
ggagatttccctgtc

SEQ ID NO: 61103 - DNA, 15 bp, Homo sapiens
gagatttccctgtcg

SEQ ID NO: 61104 - DNA, 15 bp, Homo sapiens
agatttccctgtcgc

SEQ ID NO: 61105 - DNA, 15 bp, Homo sapiens
gatttccctgtcgcc

SEQ ID NO: 61106 - DNA, 15 bp, Homo sapiens
atttccctgtcgcca

SEQ ID NO: 61107 - DNA, 15 bp, Homo sapiens
tttccctgtcgccag

SEQ ID NO: 61108 - DNA, 15 bp, Homo sapiens
ttccctgtcgccagg

SEQ ID NO: 61109 - DNA, 15 bp, Homo sapiens
tccctgtcgccaggt

SEQ ID NO: 61110 - DNA, 15 bp, Homo sapiens
ccctgtcgccaggta

SEQ ID NO: 61111 - DNA, 15 bp, Homo sapiens
cctgtcgccaggtaa

SEQ ID NO: 61112 - DNA, 15 bp, Homo sapiens
ctgtcgccaggtaag

SEQ ID NO: 61113 - DNA, 15 bp, Homo sapiens
tgtcgccaggtaaga

SEQ ID NO: 61114 - DNA, 15 bp, Homo sapiens
gtcgccaggtaagaa

SEQ ID NO: 61115 - DNA, 15 bp, Homo sapiens
tcgccaggtaagaaa

SEQ ID NO: 61116 - DNA, 15 bp, Homo sapiens
cgccaggtaagaaaa

SEQ ID NO: 61117 - DNA, 15 bp, Homo sapiens
gccaggtaagaaaac

SEQ ID NO: 61118 - DNA, 15 bp, Homo sapiens
ccaggtaagaaaacc

SEQ ID NO: 61119 - DNA, 15 bp, Homo sapiens
caggtaagaaaacct

SEQ ID NO: 61120 - DNA, 15 bp, Homo sapiens
aggtaagaaaacctt

SEQ ID NO: 61121 - DNA, 15 bp, Homo sapiens
ggtaagaaaaccttc

SEQ ID NO: 61122 - DNA, 15 bp, Homo sapiens
gtaagaaaaccttcg

SEQ ID NO: 61123 - DNA, 15 bp, Homo sapiens
taagaaaaccttcgc

SEQ ID NO: 61124 - DNA, 15 bp, Homo sapiens
aagaaaaccttcgcc

SEQ ID NO: 61125 - DNA, 15 bp, Homo sapiens
agaaaaccttcgcct

SEQ ID NO: 61126 - DNA, 15 bp, Homo sapiens
gaaaaccttcgcctt

SEQ ID NO: 61127 - DNA, 15 bp, Homo sapiens
aaaaccttcgccttg

SEQ ID NO: 61128 - DNA, 15 bp, Homo sapiens
aaaccttcgccttgt

SEQ ID NO: 61129 - DNA, 15 bp, Homo sapiens
aaccttcgccttgtc

SEQ ID NO: 61130 - DNA, 15 bp, Homo sapiens
accttcgccttgtca

SEQ ID NO: 61131 - DNA, 15 bp, Homo sapiens
ccttcgccttgtcag

SEQ ID NO: 61132 - DNA, 15 bp, Homo sapiens
cttcgccttgtcagg

SEQ ID NO: 61133 - DNA, 15 bp, Homo sapiens
ttcgccttgtcaggc

SEQ ID NO: 61134 - DNA, 15 bp, Homo sapiens
tcgccttgtcaggct

SEQ ID NO: 61135 - DNA, 15 bp, Homo sapiens
cgccttgtcaggcta

SEQ ID NO: 61136 - DNA, 15 bp, Homo sapiens
gccttgtcaggctag

SEQ ID NO: 61137 - DNA, 15 bp, Homo sapiens
ccttgtcaggctagg

SEQ ID NO: 61138 - DNA, 15 bp, Homo sapiens
cttgtcaggctaggg

SEQ ID NO: 61139 - DNA, 15 bp, Homo sapiens
ttgtcaggctagggc

SEQ ID NO: 61140 - DNA, 15 bp, Homo sapiens
tgtcaggctagggcg

SEQ ID NO: 61141 - DNA, 15 bp, Homo sapiens
gtcaggctagggcgg

SEQ ID NO: 61142 - DNA, 15 bp, Homo sapiens
tcaggctagggcggg

SEQ ID NO: 61143 - DNA, 15 bp, Homo sapiens
caggctagggcggga

SEQ ID NO: 61144 - DNA, 15 bp, Homo sapiens
aggctagggcgggaa

SEQ ID NO: 61145 - DNA, 15 bp, Homo sapiens
ggctagggcgggaag

SEQ ID NO: 61146 - DNA, 15 bp, Homo sapiens
gctagggcgggaaga

SEQ ID NO: 61147 - DNA, 15 bp, Homo sapiens
ctagggcgggaagac

SEQ ID NO: 61148 - DNA, 15 bp, Homo sapiens
tagggcgggaagacc

SEQ ID NO: 61149 - DNA, 15 bp, Homo sapiens
agggcgggaagaccg

SEQ ID NO: 61150 - DNA, 15 bp, Homo sapiens
gggcgggaagaccgc

SEQ ID NO: 61151 - DNA, 15 bp, Homo sapiens
ggcgggaagaccgct

SEQ ID NO: 61152 - DNA, 15 bp, Homo sapiens
gcgggaagaccgctg

SEQ ID NO: 61153 - DNA, 15 bp, Homo sapiens
cgggaagaccgctgg

SEQ ID NO: 61154 - DNA, 15 bp, Homo sapiens
gggaagaccgctggg

SEQ ID NO: 61155 - DNA, 15 bp, Homo sapiens
ggaagaccgctgggg

SEQ ID NO: 61156 - DNA, 15 bp, Homo sapiens
gaagaccgctgggga

SEQ ID NO: 61157 - DNA, 15 bp, Homo sapiens
aagaccgctggggaa

SEQ ID NO: 61158 - DNA, 15 bp, Homo sapiens
agaccgctggggaac

SEQ ID NO: 61159 - DNA, 15 bp, Homo sapiens
gaccgctggggaact

SEQ ID NO: 61160 - DNA, 15 bp, Homo sapiens
accgctggggaactt

SEQ ID NO: 61161 - DNA, 15 bp, Homo sapiens
ccgctggggaacttg

SEQ ID NO: 61162 - DNA, 15 bp, Homo sapiens
cgctggggaacttgt

SEQ ID NO: 61163 - DNA, 15 bp, Homo sapiens
gctggggaacttgtt

SEQ ID NO: 61164 - DNA, 15 bp, Homo sapiens
ctggggaacttgttg

SEQ ID NO: 61165 - DNA, 15 bp, Homo sapiens
tggggaacttgttgc

SEQ ID NO: 61166 - DNA, 15 bp, Homo sapiens
ggggaacttgttgct

SEQ ID NO: 61167 - DNA, 15 bp, Homo sapiens
gggaacttgttgctt

SEQ ID NO: 61168 - DNA, 15 bp, Homo sapiens
ggaacttgttgctta

SEQ ID NO: 61169 - DNA, 15 bp, Homo sapiens
gaacttgttgcttat

SEQ ID NO: 61170 - DNA, 15 bp, Homo sapiens
aacttgttgcttatc

SEQ ID NO: 61171 - DNA, 15 bp, Homo sapiens
acttgttgcttatca

SEQ ID NO: 61172 - DNA, 15 bp, Homo sapiens
cttgttgcttatcag

SEQ ID NO: 61173 - DNA, 15 bp, Homo sapiens
ttgttgcttatcagc

SEQ ID NO: 61174 - DNA, 15 bp, Homo sapiens
tgttgcttatcagcg

SEQ ID NO: 61175 - DNA, 15 bp, Homo sapiens
gttgcttatcagcgc

SEQ ID NO: 61176 - DNA, 15 bp, Homo sapiens
ttgcttatcagcgcc

SEQ ID NO: 61177 - DNA, 15 bp, Homo sapiens
tgcttatcagcgccg

SEQ ID NO: 61178 - DNA, 15 bp, Homo sapiens
gcttatcagcgccgg

SEQ ID NO: 61179 - DNA, 15 bp, Homo sapiens
cttatcagcgccggc

SEQ ID NO: 61180 - DNA, 15 bp, Homo sapiens
ttatcagcgccggca

SEQ ID NO: 61181 - DNA, 15 bp, Homo sapiens
tatcagcgccggcag

SEQ ID NO: 61182 - DNA, 15 bp, Homo sapiens
atcagcgccggcaga

SEQ ID NO: 61183 - DNA, 15 bp, Homo sapiens
tcagcgccggcagac

SEQ ID NO: 61184 - DNA, 15 bp, Homo sapiens
cagcgccggcagact

SEQ ID NO: 61185 - DNA, 15 bp, Homo sapiens
agcgccggcagacta

SEQ ID NO: 61186 - DNA, 15 bp, Homo sapiens
gcgccggcagactac

SEQ ID NO: 61187 - DNA, 15 bp, Homo sapiens
cgccggcagactacc

SEQ ID NO: 61188 - DNA, 15 bp, Homo sapiens
gccggcagactaccg

SEQ ID NO: 61189 - DNA, 15 bp, Homo sapiens
ccggcagactaccgc

SEQ ID NO: 61190 - DNA, 15 bp, Homo sapiens
cggcagactaccgct

SEQ ID NO: 61191 - DNA, 15 bp, Homo sapiens
ggcagactaccgctt

SEQ ID NO: 61192 - DNA, 15 bp, Homo sapiens
gcagactaccgcttt

SEQ ID NO: 61193 - DNA, 15 bp, Homo sapiens
cagactaccgcttta

SEQ ID NO: 61194 - DNA, 15 bp, Homo sapiens
agactaccgctttaa

SEQ ID NO: 61195 - DNA, 15 bp, Homo sapiens
gactaccgctttaat

SEQ ID NO: 61196 - DNA, 15 bp, Homo sapiens
actaccgctttaata

SEQ ID NO: 61197 - DNA, 15 bp, Homo sapiens
ctaccgctttaataa

SEQ ID NO: 61198 - DNA, 15 bp, Homo sapiens
taccgctttaataat

SEQ ID NO: 61199 - DNA, 15 bp, Homo sapiens
accgctttaataata

SEQ ID NO: 61200 - DNA, 15 bp, Homo sapiens
ccgctttaataataa

SEQ ID NO: 61201 - DNA, 15 bp, Homo sapiens
cgctttaataataat

SEQ ID NO: 61202 - DNA, 15 bp, Homo sapiens
gctttaataataata

SEQ ID NO: 61203 - DNA, 15 bp, Homo sapiens
ctttaataataatac

SEQ ID NO: 61204 - DNA, 15 bp, Homo sapiens
tttaataataatacc

SEQ ID NO: 61205 - DNA, 15 bp, Homo sapiens
ttaataataatacca

SEQ ID NO: 61206 - DNA, 15 bp, Homo sapiens
taataataataccag

SEQ ID NO: 61207 - DNA, 15 bp, Homo sapiens
aataataataccaga

SEQ ID NO: 61208 - DNA, 15 bp, Homo sapiens
ataataataccagaa

SEQ ID NO: 61209 - DNA, 15 bp, Homo sapiens
taataataccagaaa

SEQ ID NO: 61210 - DNA, 15 bp, Homo sapiens
aataataccagaaaa

SEQ ID NO: 61211 - DNA, 15 bp, Homo sapiens
ataataccagaaaag

SEQ ID NO: 61212 - DNA, 15 bp, Homo sapiens
taataccagaaaagc

SEQ ID NO: 61213 - DNA, 15 bp, Homo sapiens
aataccagaaaagcg

SEQ ID NO: 61214 - DNA, 15 bp, Homo sapiens
ataccagaaaagcgc

SEQ ID NO: 61215 - DNA, 15 bp, Homo sapiens
taccagaaaagcgca

SEQ ID NO: 61216 - DNA, 15 bp, Homo sapiens
accagaaaagcgcag

SEQ ID NO: 61217 - DNA, 15 bp, Homo sapiens
ccagaaaagcgcagc

SEQ ID NO: 61218 - DNA, 15 bp, Homo sapiens
cagaaaagcgcagca

SEQ ID NO: 61219 - DNA, 15 bp, Homo sapiens
agaaaagcgcagcag

SEQ ID NO: 61220 - DNA, 15 bp, Homo sapiens
gaaaagcgcagcagg

SEQ ID NO: 61221 - DNA, 15 bp, Homo sapiens
aaaagcgcagcaggg

SEQ ID NO: 61222 - DNA, 15 bp, Homo sapiens
aaagcgcagcaggga

SEQ ID NO: 61223 - DNA, 15 bp, Homo sapiens
aagcgcagcagggag

SEQ ID NO: 61224 - DNA, 15 bp, Homo sapiens
agcgcagcagggagg

SEQ ID NO: 61225 - DNA, 15 bp, Homo sapiens
gcgcagcagggaggg

SEQ ID NO: 61226 - DNA, 15 bp, Homo sapiens
cgcagcagggagggg

SEQ ID NO: 61227 - DNA, 15 bp, Homo sapiens
gcagcagggaggggg

SEQ ID NO: 61228 - DNA, 15 bp, Homo sapiens
cagcagggagggggt

SEQ ID NO: 61229 - DNA, 15 bp, Homo sapiens
agcagggagggggtg

SEQ ID NO: 61230 - DNA, 15 bp, Homo sapiens
gcagggagggggtgg

SEQ ID NO: 61231 - DNA, 15 bp, Homo sapiens
cagggagggggtggg

SEQ ID NO: 61232 - DNA, 15 bp, Homo sapiens
agggagggggtgggg

SEQ ID NO: 61233 - DNA, 15 bp, Homo sapiens
gggagggggtggggg

SEQ ID NO: 61234 - DNA, 15 bp, Homo sapiens
ggagggggtgggggg

SEQ ID NO: 61235 - DNA, 15 bp, Homo sapiens
gagggggtggggggc

SEQ ID NO: 61236 - DNA, 15 bp, Homo sapiens
agggggtggggggcg

SEQ ID NO: 61237 - DNA, 15 bp, Homo sapiens
gggggtggggggcgg

SEQ ID NO: 61238 - DNA, 15 bp, Homo sapiens
ggggtggggggcggc

SEQ ID NO: 61239 - DNA, 15 bp, Homo sapiens
gggtggggggcggca

SEQ ID NO: 61240 - DNA, 15 bp, Homo sapiens
ggtggggggcggcaa

SEQ ID NO: 61241 - DNA, 15 bp, Homo sapiens
gtggggggcggcaac

SEQ ID NO: 61242 - DNA, 15 bp, Homo sapiens
tggggggcggcaacg

SEQ ID NO: 61243 - DNA, 15 bp, Homo sapiens
ggggggcggcaacgg

SEQ ID NO: 61244 - DNA, 15 bp, Homo sapiens
gggggcggcaacggc

SEQ ID NO: 61245 - DNA, 15 bp, Homo sapiens
ggggcggcaacggcg

SEQ ID NO: 61246 - DNA, 15 bp, Homo sapiens
gggcggcaacggcga

SEQ ID NO: 61247 - DNA, 15 bp, Homo sapiens
ggcggcaacggcgac

SEQ ID NO: 61248 - DNA, 15 bp, Homo sapiens
gcggcaacggcgacg

SEQ ID NO: 61249 - DNA, 15 bp, Homo sapiens
cggcaacggcgacga

SEQ ID NO: 61250 - DNA, 15 bp, Homo sapiens
ggcaacggcgacgac

SEQ ID NO: 61251 - DNA, 15 bp, Homo sapiens
gcaacggcgacgact

SEQ ID NO: 61252 - DNA, 15 bp, Homo sapiens
caacggcgacgacta

SEQ ID NO: 61253 - DNA, 15 bp, Homo sapiens
aacggcgacgactaa

SEQ ID NO: 61254 - DNA, 15 bp, Homo sapiens
acggcgacgactaac

SEQ ID NO: 61255 - DNA, 15 bp, Homo sapiens
cggcgacgactaacc

SEQ ID NO: 61256 - DNA, 15 bp, Homo sapiens
ggcgacgactaacct

SEQ ID NO: 61257 - DNA, 15 bp, Homo sapiens
gcgacgactaacctc

SEQ ID NO: 61258 - DNA, 15 bp, Homo sapiens
cgacgactaacctcg

SEQ ID NO: 61259 - DNA, 15 bp, Homo sapiens
gacgactaacctcgc

SEQ ID NO: 61260 - DNA, 15 bp, Homo sapiens
acgactaacctcgct

SEQ ID NO: 61261 - DNA, 15 bp, Homo sapiens
cgactaacctcgctg

SEQ ID NO: 61262 - DNA, 15 bp, Homo sapiens
gactaacctcgctgt

SEQ ID NO: 61263 - DNA, 15 bp, Homo sapiens
actaacctcgctgtt

SEQ ID NO: 61264 - DNA, 15 bp, Homo sapiens
ctaacctcgctgttt

SEQ ID NO: 61265 - DNA, 15 bp, Homo sapiens
taacctcgctgttta

SEQ ID NO: 61266 - DNA, 15 bp, Homo sapiens
aacctcgctgtttac

SEQ ID NO: 61267 - DNA, 15 bp, Homo sapiens
acctcgctgtttacg

SEQ ID NO: 61268 - DNA, 15 bp, Homo sapiens
cctcgctgtttacgt

SEQ ID NO: 61269 - DNA, 15 bp, Homo sapiens
ctcgctgtttacgtg

SEQ ID NO: 61270 - DNA, 15 bp, Homo sapiens
tcgctgtttacgtga

SEQ ID NO: 61271 - DNA, 15 bp, Homo sapiens
cgctgtttacgtgac

SEQ ID NO: 61272 - DNA, 15 bp, Homo sapiens
gctgtttacgtgacc

SEQ ID NO: 61273 - DNA, 15 bp, Homo sapiens
ctgtttacgtgaccg

SEQ ID NO: 61274 - DNA, 15 bp, Homo sapiens
tgtttacgtgaccga

SEQ ID NO: 61275 - DNA, 15 bp, Homo sapiens
gtttacgtgaccgac

SEQ ID NO: 61276 - DNA, 15 bp, Homo sapiens
tttacgtgaccgact

SEQ ID NO: 61277 - DNA, 15 bp, Homo sapiens
ttacgtgaccgactc

SEQ ID NO: 61278 - DNA, 15 bp, Homo sapiens
tacgtgaccgactca

SEQ ID NO: 61279 - DNA, 15 bp, Homo sapiens
acgtgaccgactcac

SEQ ID NO: 61280 - DNA, 15 bp, Homo sapiens
cgtgaccgactcact

SEQ ID NO: 61281 - DNA, 15 bp, Homo sapiens
gtgaccgactcactg

SEQ ID NO: 61282 - DNA, 15 bp, Homo sapiens
tgaccgactcactgt

SEQ ID NO: 61283 - DNA, 15 bp, Homo sapiens
gaccgactcactgtg

SEQ ID NO: 61284 - DNA, 15 bp, Homo sapiens
accgactcactgtga

SEQ ID NO: 61285 - DNA, 15 bp, Homo sapiens
ccgactcactgtgac

SEQ ID NO: 61286 - DNA, 15 bp, Homo sapiens
cgactcactgtgact

SEQ ID NO: 61287 - DNA, 15 bp, Homo sapiens
gactcactgtgactc

SEQ ID NO: 61288 - DNA, 15 bp, Homo sapiens
actcactgtgactct

SEQ ID NO: 61289 - DNA, 15 bp, Homo sapiens
ctcactgtgactctc

SEQ ID NO: 61290 - DNA, 15 bp, Homo sapiens
tcactgtgactctct

SEQ ID NO: 61291 - DNA, 15 bp, Homo sapiens
cactgtgactctctg

SEQ ID NO: 61292 - DNA, 15 bp, Homo sapiens
actgtgactctctgg

SEQ ID NO: 61293 - DNA, 15 bp, Homo sapiens
ctgtgactctctggg

SEQ ID NO: 61294 - DNA, 15 bp, Homo sapiens
tgtgactctctgggt

SEQ ID NO: 61295 - DNA, 15 bp, Homo sapiens
gtgactctctgggta

SEQ ID NO: 61296 - DNA, 15 bp, Homo sapiens
tgactctctgggtaa

SEQ ID NO: 61297 - DNA, 15 bp, Homo sapiens
gactctctgggtaaa

SEQ ID NO: 61298 - DNA, 15 bp, Homo sapiens
actctctgggtaaaa

SEQ ID NO: 61299 - DNA, 15 bp, Homo sapiens
ctctctgggtaaaaa

SEQ ID NO: 61300 - DNA, 15 bp, Homo sapiens
tctctgggtaaaaaa

SEQ ID NO: 61301 - DNA, 15 bp, Homo sapiens
ctctgggtaaaaaaa

SEQ ID NO: 61302 - DNA, 15 bp, Homo sapiens
tctgggtaaaaaaag

SEQ ID NO: 61303 - DNA, 15 bp, Homo sapiens
ctgggtaaaaaaagg

SEQ ID NO: 61304 - DNA, 15 bp, Homo sapiens
tgggtaaaaaaagga

SEQ ID NO: 61305 - DNA, 15 bp, Homo sapiens
gggtaaaaaaaggaa

SEQ ID NO: 61306 - DNA, 15 bp, Homo sapiens
ggtaaaaaaaggaaa

SEQ ID NO: 61307 - DNA, 15 bp, Homo sapiens
gtaaaaaaaggaaac

SEQ ID NO: 61308 - DNA, 15 bp, Homo sapiens
taaaaaaaggaaact

SEQ ID NO: 61309 - DNA, 15 bp, Homo sapiens
aaaaaaaggaaactt

SEQ ID NO: 61310 - DNA, 15 bp, Homo sapiens
aaaaaaggaaacttc

SEQ ID NO: 61311 - DNA, 15 bp, Homo sapiens
aaaaaggaaacttct

SEQ ID NO: 61312 - DNA, 15 bp, Homo sapiens
aaaaggaaacttctt

SEQ ID NO: 61313 - DNA, 15 bp, Homo sapiens
aaaggaaacttctta

SEQ ID NO: 61314 - DNA, 15 bp, Homo sapiens
aaggaaacttcttag

SEQ ID NO: 61315 - DNA, 15 bp, Homo sapiens
aggaaacttcttaga

SEQ ID NO: 61316 - DNA, 15 bp, Homo sapiens
ggaaacttcttagaa

SEQ ID NO: 61317 - DNA, 15 bp, Homo sapiens
gaaacttcttagaaa

SEQ ID NO: 61318 - DNA, 15 bp, Homo sapiens
aaacttcttagaaaa

SEQ ID NO: 61319 - DNA, 15 bp, Homo sapiens
aacttcttagaaaag

SEQ ID NO: 61320 - DNA, 15 bp, Homo sapiens
acttcttagaaaagt

SEQ ID NO: 61321 - DNA, 15 bp, Homo sapiens
cttcttagaaaagtt

SEQ ID NO: 61322 - DNA, 15 bp, Homo sapiens
ttcttagaaaagttc

SEQ ID NO: 61323 - DNA, 15 bp, Homo sapiens
tcttagaaaagttcg

SEQ ID NO: 61324 - DNA, 15 bp, Homo sapiens
cttagaaaagttcgt

SEQ ID NO: 61325 - DNA, 15 bp, Homo sapiens
ttagaaaagttcgtg

SEQ ID NO: 61326 - DNA, 15 bp, Homo sapiens
tagaaaagttcgtgc

SEQ ID NO: 61327 - DNA, 15 bp, Homo sapiens
agaaaagttcgtgcc

SEQ ID NO: 61328 - DNA, 15 bp, Homo sapiens
gaaaagttcgtgccc

SEQ ID NO: 61329 - DNA, 15 bp, Homo sapiens
aaaagttcgtgcccc

SEQ ID NO: 61330 - DNA, 15 bp, Homo sapiens
aaagttcgtgcccct

SEQ ID NO: 61331 - DNA, 15 bp, Homo sapiens
aagttcgtgcccctc

SEQ ID NO: 61332 - DNA, 15 bp, Homo sapiens
agttcgtgcccctcc

SEQ ID NO: 61333 - DNA, 15 bp, Homo sapiens
gttcgtgcccctccc

SEQ ID NO: 61334 - DNA, 15 bp, Homo sapiens
ttcgtgcccctcccc

SEQ ID NO: 61335 - DNA, 15 bp, Homo sapiens
tcgtgcccctccccc

SEQ ID NO: 61336 - DNA, 15 bp, Homo sapiens
cgtgcccctccccct

SEQ ID NO: 61337 - DNA, 15 bp, Homo sapiens
gtgcccctccccctc

SEQ ID NO: 61338 - DNA, 15 bp, Homo sapiens
tgcccctccccctcc

SEQ ID NO: 61339 - DNA, 15 bp, Homo sapiens
gcccctccccctccc

SEQ ID NO: 61340 - DNA, 15 bp, Homo sapiens
cccctccccctcccc

SEQ ID NO: 61341 - DNA, 15 bp, Homo sapiens
ccctccccctccccc

SEQ ID NO: 61342 - DNA, 15 bp, Homo sapiens
cctccccctccccca

SEQ ID NO: 61343 - DNA, 15 bp, Homo sapiens
ctccccctcccccat

SEQ ID NO: 61344 - DNA, 15 bp, Homo sapiens
tccccctcccccatc

SEQ ID NO: 61345 - DNA, 15 bp, Homo sapiens
ccccctcccccatca

SEQ ID NO: 61346 - DNA, 15 bp, Homo sapiens
cccctcccccatcat

SEQ ID NO: 61347 - DNA, 15 bp, Homo sapiens
ccctcccccatcatg

SEQ ID NO: 61348 - DNA, 15 bp, Homo sapiens
cctcccccatcatga

SEQ ID NO: 61349 - DNA, 15 bp, Homo sapiens
ctcccccatcatgac

SEQ ID NO: 61350 - DNA, 15 bp, Homo sapiens
tcccccatcatgact

SEQ ID NO: 61351 - DNA, 15 bp, Homo sapiens
cccccatcatgacta

SEQ ID NO: 61352 - DNA, 15 bp, Homo sapiens
ccccatcatgactaa

SEQ ID NO: 61353 - DNA, 15 bp, Homo sapiens
cccatcatgactaag

SEQ ID NO: 61354 - DNA, 15 bp, Homo sapiens
ccatcatgactaagg

SEQ ID NO: 61355 - DNA, 15 bp, Homo sapiens
catcatgactaaggg

SEQ ID NO: 61356 - DNA, 15 bp, Homo sapiens
atcatgactaagggt

SEQ ID NO: 61357 - DNA, 15 bp, Homo sapiens
tcatgactaagggtc

SEQ ID NO: 61358 - DNA, 15 bp, Homo sapiens
catgactaagggtct

SEQ ID NO: 61359 - DNA, 15 bp, Homo sapiens
atgactaagggtctc

SEQ ID NO: 61360 - DNA, 15 bp, Homo sapiens
tgactaagggtctcc

SEQ ID NO: 61361 - DNA, 15 bp, Homo sapiens
gactaagggtctcca

SEQ ID NO: 61362 - DNA, 15 bp, Homo sapiens
actaagggtctccag

SEQ ID NO: 61363 - DNA, 15 bp, Homo sapiens
ctaagggtctccagc

SEQ ID NO: 61364 - DNA, 15 bp, Homo sapiens
taagggtctccagcc

SEQ ID NO: 61365 - DNA, 15 bp, Homo sapiens
aagggtctccagccg

SEQ ID NO: 61366 - DNA, 15 bp, Homo sapiens
agggtctccagccga

SEQ ID NO: 61367 - DNA, 15 bp, Homo sapiens
gggtctccagccgat

SEQ ID NO: 61368 - DNA, 15 bp, Homo sapiens
ggtctccagccgatg

SEQ ID NO: 61369 - DNA, 15 bp, Homo sapiens
gtctccagccgatga

SEQ ID NO: 61370 - DNA, 15 bp, Homo sapiens
tctccagccgatgag

SEQ ID NO: 61371 - DNA, 15 bp, Homo sapiens
ctccagccgatgagg

SEQ ID NO: 61372 - DNA, 15 bp, Homo sapiens
tccagccgatgaggt

SEQ ID NO: 61373 - DNA, 15 bp, Homo sapiens
ccagccgatgaggtc

SEQ ID NO: 61374 - DNA, 15 bp, Homo sapiens
cagccgatgaggtcg

SEQ ID NO: 61375 - DNA, 15 bp, Homo sapiens
agccgatgaggtcgt

SEQ ID NO: 61376 - DNA, 15 bp, Homo sapiens
gccgatgaggtcgtg

SEQ ID NO: 61377 - DNA, 15 bp, Homo sapiens
ccgatgaggtcgtga

SEQ ID NO: 61378 - DNA, 15 bp, Homo sapiens
cgatgaggtcgtgag

SEQ ID NO: 61379 - DNA, 15 bp, Homo sapiens
gatgaggtcgtgagt

SEQ ID NO: 61380 - DNA, 15 bp, Homo sapiens
atgaggtcgtgagtg

SEQ ID NO: 61381 - DNA, 15 bp, Homo sapiens
tgaggtcgtgagtga

SEQ ID NO: 61382 - DNA, 15 bp, Homo sapiens
gaggtcgtgagtgat

SEQ ID NO: 61383 - DNA, 15 bp, Homo sapiens
aggtcgtgagtgatg

SEQ ID NO: 61384 - DNA, 15 bp, Homo sapiens
ggtcgtgagtgatga

SEQ ID NO: 61385 - DNA, 15 bp, Homo sapiens
gtcgtgagtgatgat

SEQ ID NO: 61386 - DNA, 15 bp, Homo sapiens
tcgtgagtgatgatc

SEQ ID NO: 61387 - DNA, 15 bp, Homo sapiens
cgtgagtgatgatca

SEQ ID NO: 61388 - DNA, 15 bp, Homo sapiens
gtgagtgatgatcaa

SEQ ID NO: 61389 - DNA, 15 bp, Homo sapiens
tgagtgatgatcaaa

SEQ ID NO: 61390 - DNA, 15 bp, Homo sapiens
gagtgatgatcaaat

SEQ ID NO: 61391 - DNA, 15 bp, Homo sapiens
agtgatgatcaaatg

SEQ ID NO: 61392 - DNA, 15 bp, Homo sapiens
gtgatgatcaaatgg

SEQ ID NO: 61393 - DNA, 15 bp, Homo sapiens
tgatgatcaaatggg

SEQ ID NO: 61394 - DNA, 15 bp, Homo sapiens
gatgatcaaatgggg

SEQ ID NO: 61395 - DNA, 15 bp, Homo sapiens
atgatcaaatgggga

SEQ ID NO: 61396 - DNA, 15 bp, Homo sapiens
tgatcaaatggggac

SEQ ID NO: 61397 - DNA, 15 bp, Homo sapiens
gatcaaatggggact

SEQ ID NO: 61398 - DNA, 15 bp, Homo sapiens
atcaaatggggactg

SEQ ID NO: 61399 - DNA, 15 bp, Homo sapiens
tcaaatggggactgg

SEQ ID NO: 61400 - DNA, 15 bp, Homo sapiens
caaatggggactggg

SEQ ID NO: 61401 - DNA, 15 bp, Homo sapiens
aaatggggactgggg

SEQ ID NO: 61402 - DNA, 15 bp, Homo sapiens
aatggggactggggg

SEQ ID NO: 61403 - DNA, 15 bp, Homo sapiens
atggggactgggggg

SEQ ID NO: 61404 - DNA, 15 bp, Homo sapiens
tggggactgggggga

SEQ ID NO: 61405 - DNA, 15 bp, Homo sapiens
ggggactggggggag

SEQ ID NO: 61406 - DNA, 15 bp, Homo sapiens
gggactggggggagg

SEQ ID NO: 61407 - DNA, 15 bp, Homo sapiens
ggactggggggaggg

SEQ ID NO: 61408 - DNA, 15 bp, Homo sapiens
gactggggggagggg

SEQ ID NO: 61409 - DNA, 15 bp, Homo sapiens
actggggggaggggg

SEQ ID NO: 61410 - DNA, 15 bp, Homo sapiens
ctggggggagggggg

SEQ ID NO: 61411 - DNA, 15 bp, Homo sapiens
tggggggaggggggc

SEQ ID NO: 61412 - DNA, 15 bp, Homo sapiens
ggggggaggggggcg

SEQ ID NO: 61413 - DNA, 15 bp, Homo sapiens
gggggaggggggcga

SEQ ID NO: 61414 - DNA, 15 bp, Homo sapiens
ggggaggggggcgag

SEQ ID NO: 61415 - DNA, 15 bp, Homo sapiens
gggaggggggcgagt

SEQ ID NO: 61416 - DNA, 15 bp, Homo sapiens
ggaggggggcgagta

SEQ ID NO: 61417 - DNA, 15 bp, Homo sapiens
gaggggggcgagtaa

SEQ ID NO: 61418 - DNA, 15 bp, Homo sapiens
aggggggcgagtaag

SEQ ID NO: 61419 - DNA, 15 bp, Homo sapiens
ggggggcgagtaagt

SEQ ID NO: 61420 - DNA, 15 bp, Homo sapiens
gggggcgagtaagtg

SEQ ID NO: 61421 - DNA, 15 bp, Homo sapiens
ggggcgagtaagtga

SEQ ID NO: 61422 - DNA, 15 bp, Homo sapiens
gggcgagtaagtgac

SEQ ID NO: 61423 - DNA, 15 bp, Homo sapiens
ggcgagtaagtgact

SEQ ID NO: 61424 - DNA, 15 bp, Homo sapiens
gcgagtaagtgactt

SEQ ID NO: 61425 - DNA, 15 bp, Homo sapiens
cgagtaagtgacttg

SEQ ID NO: 61426 - DNA, 15 bp, Homo sapiens
gagtaagtgacttgt

SEQ ID NO: 61427 - DNA, 15 bp, Homo sapiens
agtaagtgacttgtc

SEQ ID NO: 61428 - DNA, 15 bp, Homo sapiens
gtaagtgacttgtcc

SEQ ID NO: 61429 - DNA, 15 bp, Homo sapiens
taagtgacttgtcct

SEQ ID NO: 61430 - DNA, 15 bp, Homo sapiens
aagtgacttgtcctt

SEQ ID NO: 61431 - DNA, 15 bp, Homo sapiens
agtgacttgtccttg

SEQ ID NO: 61432 - DNA, 15 bp, Homo sapiens
gtgacttgtccttgg

SEQ ID NO: 61433 - DNA, 15 bp, Homo sapiens
tgacttgtccttggg

SEQ ID NO: 61434 - DNA, 15 bp, Homo sapiens
gacttgtccttggga

SEQ ID NO: 61435 - DNA, 15 bp, Homo sapiens
acttgtccttgggaa

SEQ ID NO: 61436 - DNA, 15 bp, Homo sapiens
cttgtccttgggaac

SEQ ID NO: 61437 - DNA, 15 bp, Homo sapiens
ttgtccttgggaaca

SEQ ID NO: 61438 - DNA, 15 bp, Homo sapiens
tgtccttgggaacat

SEQ ID NO: 61439 - DNA, 15 bp, Homo sapiens
gtccttgggaacatc

SEQ ID NO: 61440 - DNA, 15 bp, Homo sapiens
tccttgggaacatct

SEQ ID NO: 61441 - DNA, 15 bp, Homo sapiens
ccttgggaacatctg

SEQ ID NO: 61442 - DNA, 15 bp, Homo sapiens
cttgggaacatctgc

SEQ ID NO: 61443 - DNA, 15 bp, Homo sapiens
ttgggaacatctgca

SEQ ID NO: 61444 - DNA, 15 bp, Homo sapiens
tgggaacatctgcat

SEQ ID NO: 61445 - DNA, 15 bp, Homo sapiens
gggaacatctgcatg

SEQ ID NO: 61446 - DNA, 15 bp, Homo sapiens
ggaacatctgcatgc

SEQ ID NO: 61447 - DNA, 15 bp, Homo sapiens
gaacatctgcatgcg

SEQ ID NO: 61448 - DNA, 15 bp, Homo sapiens
aacatctgcatgcgt

SEQ ID NO: 61449 - DNA, 15 bp, Homo sapiens
acatctgcatgcgtc

SEQ ID NO: 61450 - DNA, 15 bp, Homo sapiens
catctgcatgcgtcg

SEQ ID NO: 61451 - DNA, 15 bp, Homo sapiens
atctgcatgcgtcga

SEQ ID NO: 61452 - DNA, 15 bp, Homo sapiens
tctgcatgcgtcgaa

SEQ ID NO: 61453 - DNA, 15 bp, Homo sapiens
ctgcatgcgtcgaag

SEQ ID NO: 61454 - DNA, 15 bp, Homo sapiens
tgcatgcgtcgaagc

SEQ ID NO: 61455 - DNA, 15 bp, Homo sapiens
gcatgcgtcgaagcg

SEQ ID NO: 61456 - DNA, 15 bp, Homo sapiens
catgcgtcgaagcgc

SEQ ID NO: 61457 - DNA, 15 bp, Homo sapiens
atgcgtcgaagcgcg

SEQ ID NO: 61458 - DNA, 15 bp, Homo sapiens
tgcgtcgaagcgcga

SEQ ID NO: 61459 - DNA, 15 bp, Homo sapiens
gcgtcgaagcgcgaa

SEQ ID NO: 61460 - DNA, 15 bp, Homo sapiens
cgtcgaagcgcgaac

SEQ ID NO: 61461 - DNA, 15 bp, Homo sapiens
gtcgaagcgcgaacc

SEQ ID NO: 61462 - DNA, 15 bp, Homo sapiens
tcgaagcgcgaacca

SEQ ID NO: 61463 - DNA, 15 bp, Homo sapiens
cgaagcgcgaaccag

SEQ ID NO: 61464 - DNA, 15 bp, Homo sapiens
gaagcgcgaaccagc

SEQ ID NO: 61465 - DNA, 15 bp, Homo sapiens
aagcgcgaaccagcc

SEQ ID NO: 61466 - DNA, 15 bp, Homo sapiens
agcgcgaaccagccc

SEQ ID NO: 61467 - DNA, 15 bp, Homo sapiens
gcgcgaaccagccca

SEQ ID NO: 61468 - DNA, 15 bp, Homo sapiens
cgcgaaccagcccaa

SEQ ID NO: 61469 - DNA, 15 bp, Homo sapiens
gcgaaccagcccaac

SEQ ID NO: 61470 - DNA, 15 bp, Homo sapiens
cgaaccagcccaaca

SEQ ID NO: 61471 - DNA, 15 bp, Homo sapiens
gaaccagcccaacaa

SEQ ID NO: 61472 - DNA, 15 bp, Homo sapiens
aaccagcccaacaac

SEQ ID NO: 61473 - DNA, 15 bp, Homo sapiens
accagcccaacaact

SEQ ID NO: 61474 - DNA, 15 bp, Homo sapiens
ccagcccaacaactt

SEQ ID NO: 61475 - DNA, 15 bp, Homo sapiens
cagcccaacaacttt

SEQ ID NO: 61476 - DNA, 15 bp, Homo sapiens
agcccaacaactttc

SEQ ID NO: 61477 - DNA, 15 bp, Homo sapiens
gcccaacaactttcc

SEQ ID NO: 61478 - DNA, 15 bp, Homo sapiens
cccaacaactttccc

SEQ ID NO: 61479 - DNA, 15 bp, Homo sapiens
ccaacaactttccct

SEQ ID NO: 61480 - DNA, 15 bp, Homo sapiens
caacaactttccctt

SEQ ID NO: 61481 - DNA, 15 bp, Homo sapiens
aacaactttcccttt

SEQ ID NO: 61482 - DNA, 15 bp, Homo sapiens
acaactttccctttt

SEQ ID NO: 61483 - DNA, 15 bp, Homo sapiens
caactttcccttttc

SEQ ID NO: 61484 - DNA, 15 bp, Homo sapiens
aactttcccttttcc

SEQ ID NO: 61485 - DNA, 15 bp, Homo sapiens
actttcccttttcct

SEQ ID NO: 61486 - DNA, 15 bp, Homo sapiens
ctttcccttttcctc

SEQ ID NO: 61487 - DNA, 15 bp, Homo sapiens
tttcccttttcctct

SEQ ID NO: 61488 - DNA, 15 bp, Homo sapiens
ttcccttttcctctt

SEQ ID NO: 61489 - DNA, 15 bp, Homo sapiens
tcccttttcctctta

SEQ ID NO: 61490 - DNA, 15 bp, Homo sapiens
cccttttcctcttag

SEQ ID NO: 61491 - DNA, 15 bp, Homo sapiens
ccttttcctcttagg

SEQ ID NO: 61492 - DNA, 15 bp, Homo sapiens
cttttcctcttaggt

SEQ ID NO: 61493 - DNA, 15 bp, Homo sapiens
ttttcctcttaggta

SEQ ID NO: 61494 - DNA, 15 bp, Homo sapiens
tttcctcttaggtac

SEQ ID NO: 61495 - DNA, 15 bp, Homo sapiens
ttcctcttaggtact

SEQ ID NO: 61496 - DNA, 15 bp, Homo sapiens
tcctcttaggtactg

SEQ ID NO: 61497 - DNA, 15 bp, Homo sapiens
cctcttaggtactga

SEQ ID NO: 61498 - DNA, 15 bp, Homo sapiens
ctcttaggtactgat

SEQ ID NO: 61499 - DNA, 15 bp, Homo sapiens
tcttaggtactgatg

SEQ ID NO: 61500 - DNA, 15 bp, Homo sapiens
cttaggtactgatga

SEQ ID NO: 61501 - DNA, 15 bp, Homo sapiens
ttaggtactgatgac

SEQ ID NO: 61502 - DNA, 15 bp, Homo sapiens
taggtactgatgact

SEQ ID NO: 61503 - DNA, 15 bp, Homo sapiens
aggtactgatgacta

SEQ ID NO: 61504 - DNA, 15 bp, Homo sapiens
ggtactgatgactag

SEQ ID NO: 61505 - DNA, 15 bp, Homo sapiens
gtactgatgactagg

SEQ ID NO: 61506 - DNA, 15 bp, Homo sapiens
tactgatgactaggc

SEQ ID NO: 61507 - DNA, 15 bp, Homo sapiens
actgatgactaggcg

SEQ ID NO: 61508 - DNA, 15 bp, Homo sapiens
ctgatgactaggcga

SEQ ID NO: 61509 - DNA, 15 bp, Homo sapiens
tgatgactaggcgag

SEQ ID NO: 61510 - DNA, 15 bp, Homo sapiens
gatgactaggcgaga

SEQ ID NO: 61511 - DNA, 15 bp, Homo sapiens
atgactaggcgagag

SEQ ID NO: 61512 - DNA, 15 bp, Homo sapiens
tgactaggcgagagg

SEQ ID NO: 61513 - DNA, 15 bp, Homo sapiens
gactaggcgagaggc

SEQ ID NO: 61514 - DNA, 15 bp, Homo sapiens
actaggcgagaggca

SEQ ID NO: 61515 - DNA, 15 bp, Homo sapiens
ctaggcgagaggcac

SEQ ID NO: 61516 - DNA, 15 bp, Homo sapiens
taggcgagaggcacc

SEQ ID NO: 61517 - DNA, 15 bp, Homo sapiens
aggcgagaggcacca

SEQ ID NO: 61518 - DNA, 15 bp, Homo sapiens
ggcgagaggcaccaa

SEQ ID NO: 61519 - DNA, 15 bp, Homo sapiens
gcgagaggcaccaag

SEQ ID NO: 61520 - DNA, 15 bp, Homo sapiens
cgagaggcaccaagg

SEQ ID NO: 61521 - DNA, 15 bp, Homo sapiens
gagaggcaccaaggc

SEQ ID NO: 61522 - DNA, 15 bp, Homo sapiens
agaggcaccaaggcg

SEQ ID NO: 61523 - DNA, 15 bp, Homo sapiens
gaggcaccaaggcga

SEQ ID NO: 61524 - DNA, 15 bp, Homo sapiens
aggcaccaaggcgag

SEQ ID NO: 61525 - DNA, 15 bp, Homo sapiens
ggcaccaaggcgagc

SEQ ID NO: 61526 - DNA, 15 bp, Homo sapiens
gcaccaaggcgagcc

SEQ ID NO: 61527 - DNA, 15 bp, Homo sapiens
caccaaggcgagcca

SEQ ID NO: 61528 - DNA, 15 bp, Homo sapiens
accaaggcgagccac

SEQ ID NO: 61529 - DNA, 15 bp, Homo sapiens
ccaaggcgagccact

SEQ ID NO: 61530 - DNA, 15 bp, Homo sapiens
caaggcgagccacta

SEQ ID NO: 61531 - DNA, 15 bp, Homo sapiens
aaggcgagccactag

SEQ ID NO: 61532 - DNA, 15 bp, Homo sapiens
aggcgagccactagt

SEQ ID NO: 61533 - DNA, 15 bp, Homo sapiens
ggcgagccactagtt

SEQ ID NO: 61534 - DNA, 15 bp, Homo sapiens
gcgagccactagttg

SEQ ID NO: 61535 - DNA, 15 bp, Homo sapiens
cgagccactagttgc

SEQ ID NO: 61536 - DNA, 15 bp, Homo sapiens
gagccactagttgcc

SEQ ID NO: 61537 - DNA, 15 bp, Homo sapiens
agccactagttgccc

SEQ ID NO: 61538 - DNA, 15 bp, Homo sapiens
gccactagttgccca

SEQ ID NO: 61539 - DNA, 15 bp, Homo sapiens
ccactagttgcccac

SEQ ID NO: 61540 - DNA, 15 bp, Homo sapiens
cactagttgcccaca

SEQ ID NO: 61541 - DNA, 15 bp, Homo sapiens
actagttgcccacag

SEQ ID NO: 61542 - DNA, 15 bp, Homo sapiens
ctagttgcccacagg

SEQ ID NO: 61543 - DNA, 15 bp, Homo sapiens
tagttgcccacagga

SEQ ID NO: 61544 - DNA, 15 bp, Homo sapiens
agttgcccacaggaa

SEQ ID NO: 61545 - DNA, 15 bp, Homo sapiens
gttgcccacaggaac

SEQ ID NO: 61546 - DNA, 15 bp, Homo sapiens
ttgcccacaggaacc

SEQ ID NO: 61547 - DNA, 15 bp, Homo sapiens
tgcccacaggaacct

SEQ ID NO: 61548 - DNA, 15 bp, Homo sapiens
gcccacaggaacctg

SEQ ID NO: 61549 - DNA, 15 bp, Homo sapiens
cccacaggaacctgt

SEQ ID NO: 61550 - DNA, 15 bp, Homo sapiens
ccacaggaacctgtg

SEQ ID NO: 61551 - DNA, 15 bp, Homo sapiens
cacaggaacctgtgt

SEQ ID NO: 61552 - DNA, 15 bp, Homo sapiens
acaggaacctgtgta

SEQ ID NO: 61553 - DNA, 15 bp, Homo sapiens
caggaacctgtgtaa

SEQ ID NO: 61554 - DNA, 15 bp, Homo sapiens
aggaacctgtgtaag

SEQ ID NO: 61555 - DNA, 15 bp, Homo sapiens
ggaacctgtgtaagc

SEQ ID NO: 61556 - DNA, 15 bp, Homo sapiens
gaacctgtgtaagcc

SEQ ID NO: 61557 - DNA, 15 bp, Homo sapiens
aacctgtgtaagccg

SEQ ID NO: 61558 - DNA, 15 bp, Homo sapiens
acctgtgtaagccga

SEQ ID NO: 61559 - DNA, 15 bp, Homo sapiens
cctgtgtaagccgag

SEQ ID NO: 61560 - DNA, 15 bp, Homo sapiens
ctgtgtaagccgagc

SEQ ID NO: 61561 - DNA, 15 bp, Homo sapiens
tgtgtaagccgagct

SEQ ID NO: 61562 - DNA, 15 bp, Homo sapiens
gtgtaagccgagctc

SEQ ID NO: 61563 - DNA, 15 bp, Homo sapiens
tgtaagccgagctct

SEQ ID NO: 61564 - DNA, 15 bp, Homo sapiens
gtaagccgagctctc

SEQ ID NO: 61565 - DNA, 15 bp, Homo sapiens
taagccgagctctcg

SEQ ID NO: 61566 - DNA, 15 bp, Homo sapiens
aagccgagctctcga

SEQ ID NO: 61567 - DNA, 15 bp, Homo sapiens
agccgagctctcgag

SEQ ID NO: 61568 - DNA, 15 bp, Homo sapiens
gccgagctctcgagc

SEQ ID NO: 61569 - DNA, 15 bp, Homo sapiens
ccgagctctcgagcg

SEQ ID NO: 61570 - DNA, 15 bp, Homo sapiens
cgagctctcgagcgg

SEQ ID NO: 61571 - DNA, 15 bp, Homo sapiens
gagctctcgagcggc

SEQ ID NO: 61572 - DNA, 15 bp, Homo sapiens
agctctcgagcggct

SEQ ID NO: 61573 - DNA, 15 bp, Homo sapiens
gctctcgagcggctg

SEQ ID NO: 61574 - DNA, 15 bp, Homo sapiens
ctctcgagcggctga

SEQ ID NO: 61575 - DNA, 15 bp, Homo sapiens
tctcgagcggctgag

SEQ ID NO: 61576 - DNA, 15 bp, Homo sapiens
ctcgagcggctgagt

SEQ ID NO: 61577 - DNA, 15 bp, Homo sapiens
tcgagcggctgagtt

SEQ ID NO: 61578 - DNA, 15 bp, Homo sapiens
cgagcggctgagttg

SEQ ID NO: 61579 - DNA, 15 bp, Homo sapiens
gagcggctgagttga

SEQ ID NO: 61580 - DNA, 15 bp, Homo sapiens
agcggctgagttgaa

SEQ ID NO: 61581 - DNA, 15 bp, Homo sapiens
gcggctgagttgaat

SEQ ID NO: 61582 - DNA, 15 bp, Homo sapiens
cggctgagttgaatg

SEQ ID NO: 61583 - DNA, 15 bp, Homo sapiens
ggctgagttgaatga

SEQ ID NO: 61584 - DNA, 15 bp, Homo sapiens
gctgagttgaatgaa

SEQ ID NO: 61585 - DNA, 15 bp, Homo sapiens
ctgagttgaatgaag

SEQ ID NO: 61586 - DNA, 15 bp, Homo sapiens
tgagttgaatgaagt

SEQ ID NO: 61587 - DNA, 15 bp, Homo sapiens
gagttgaatgaagtt

SEQ ID NO: 61588 - DNA, 15 bp, Homo sapiens
agttgaatgaagtta

SEQ ID NO: 61589 - DNA, 15 bp, Homo sapiens
gttgaatgaagttat

SEQ ID NO: 61590 - DNA, 15 bp, Homo sapiens
ttgaatgaagttatg

SEQ ID NO: 61591 - DNA, 15 bp, Homo sapiens
tgaatgaagttatga

SEQ ID NO: 61592 - DNA, 15 bp, Homo sapiens
gaatgaagttatgac

SEQ ID NO: 61593 - DNA, 15 bp, Homo sapiens
aatgaagttatgact

SEQ ID NO: 61594 - DNA, 15 bp, Homo sapiens
atgaagttatgactg

SEQ ID NO: 61595 - DNA, 15 bp, Homo sapiens
tgaagttatgactgc

SEQ ID NO: 61596 - DNA, 15 bp, Homo sapiens
gaagttatgactgcg

SEQ ID NO: 61597 - DNA, 15 bp, Homo sapiens
aagttatgactgcgt

SEQ ID NO: 61598 - DNA, 15 bp, Homo sapiens
agttatgactgcgtt

SEQ ID NO: 61599 - DNA, 15 bp, Homo sapiens
gttatgactgcgttt

SEQ ID NO: 61600 - DNA, 15 bp, Homo sapiens
ttatgactgcgtttg

SEQ ID NO: 61601 - DNA, 15 bp, Homo sapiens
tatgactgcgtttgc

SEQ ID NO: 61602 - DNA, 15 bp, Homo sapiens
atgactgcgtttgct

SEQ ID NO: 61603 - DNA, 15 bp, Homo sapiens
tgactgcgtttgctc

SEQ ID NO: 61604 - DNA, 15 bp, Homo sapiens
gactgcgtttgctct

SEQ ID NO: 61605 - DNA, 15 bp, Homo sapiens
actgcgtttgctcta

SEQ ID NO: 61606 - DNA, 15 bp, Homo sapiens
ctgcgtttgctctaa

SEQ ID NO: 61607 - DNA, 15 bp, Homo sapiens
tgcgtttgctctaat

SEQ ID NO: 61608 - DNA, 15 bp, Homo sapiens
gcgtttgctctaatg

SEQ ID NO: 61609 - DNA, 15 bp, Homo sapiens
cgtttgctctaatgg

SEQ ID NO: 61610 - DNA, 15 bp, Homo sapiens
gtttgctctaatggg

SEQ ID NO: 61611 - DNA, 15 bp, Homo sapiens
tttgctctaatgggt

SEQ ID NO: 61612 - DNA, 15 bp, Homo sapiens
ttgctctaatgggtt

SEQ ID NO: 61613 - DNA, 15 bp, Homo sapiens
tgctctaatgggtta

SEQ ID NO: 61614 - DNA, 15 bp, Homo sapiens
gctctaatgggttat

SEQ ID NO: 61615 - DNA, 15 bp, Homo sapiens
ctctaatgggttatg

SEQ ID NO: 61616 - DNA, 15 bp, Homo sapiens
tctaatgggttatgg

SEQ ID NO: 61617 - DNA, 15 bp, Homo sapiens
ctaatgggttatggc

SEQ ID NO: 61618 - DNA, 15 bp, Homo sapiens
taatgggttatggct

SEQ ID NO: 61619 - DNA, 15 bp, Homo sapiens
aatgggttatggctt

SEQ ID NO: 61620 - DNA, 15 bp, Homo sapiens
atgggttatggcttc

SEQ ID NO: 61621 - DNA, 15 bp, Homo sapiens
tgggttatggcttcc

SEQ ID NO: 61622 - DNA, 15 bp, Homo sapiens
gggttatggcttccc

SEQ ID NO: 61623 - DNA, 15 bp, Homo sapiens
ggttatggcttccca

SEQ ID NO: 61624 - DNA, 15 bp, Homo sapiens
gttatggcttcccaa

SEQ ID NO: 61625 - DNA, 15 bp, Homo sapiens
ttatggcttcccaaa

SEQ ID NO: 61626 - DNA, 15 bp, Homo sapiens
tatggcttcccaaat

SEQ ID NO: 61627 - DNA, 15 bp, Homo sapiens
atggcttcccaaatg

SEQ ID NO: 61628 - DNA, 15 bp, Homo sapiens
tggcttcccaaatgt

SEQ ID NO: 61629 - DNA, 15 bp, Homo sapiens
ggcttcccaaatgtg

SEQ ID NO: 61630 - DNA, 15 bp, Homo sapiens
gcttcccaaatgtga

SEQ ID NO: 61631 - DNA, 15 bp, Homo sapiens
cttcccaaatgtgag

SEQ ID NO: 61632 - DNA, 15 bp, Homo sapiens
ttcccaaatgtgagt

SEQ ID NO: 61633 - DNA, 15 bp, Homo sapiens
tcccaaatgtgagtt

SEQ ID NO: 61634 - DNA, 15 bp, Homo sapiens
cccaaatgtgagtta

SEQ ID NO: 61635 - DNA, 15 bp, Homo sapiens
ccaaatgtgagttaa

SEQ ID NO: 61636 - DNA, 15 bp, Homo sapiens
caaatgtgagttaac

SEQ ID NO: 61637 - DNA, 15 bp, Homo sapiens
aaatgtgagttaaca

SEQ ID NO: 61638 - DNA, 15 bp, Homo sapiens
aatgtgagttaacag

SEQ ID NO: 61639 - DNA, 15 bp, Homo sapiens
atgtgagttaacagc

SEQ ID NO: 61640 - DNA, 15 bp, Homo sapiens
tgtgagttaacagcc

SEQ ID NO: 61641 - DNA, 15 bp, Homo sapiens
gtgagttaacagccc

SEQ ID NO: 61642 - DNA, 15 bp, Homo sapiens
tgagttaacagcccc

SEQ ID NO: 61643 - DNA, 15 bp, Homo sapiens
gagttaacagccccg

SEQ ID NO: 61644 - DNA, 15 bp, Homo sapiens
agttaacagccccgg

SEQ ID NO: 61645 - DNA, 15 bp, Homo sapiens
gttaacagccccggt

SEQ ID NO: 61646 - DNA, 15 bp, Homo sapiens
ttaacagccccggtg

SEQ ID NO: 61647 - DNA, 15 bp, Homo sapiens
taacagccccggtgc

SEQ ID NO: 61648 - DNA, 15 bp, Homo sapiens
aacagccccggtgcg

SEQ ID NO: 61649 - DNA, 15 bp, Homo sapiens
acagccccggtgcgc

SEQ ID NO: 61650 - DNA, 15 bp, Homo sapiens
cagccccggtgcgca

SEQ ID NO: 61651 - DNA, 15 bp, Homo sapiens
agccccggtgcgcag

SEQ ID NO: 61652 - DNA, 15 bp, Homo sapiens
gccccggtgcgcagc

SEQ ID NO: 61653 - DNA, 15 bp, Homo sapiens
ccccggtgcgcagct

SEQ ID NO: 61654 - DNA, 15 bp, Homo sapiens
cccggtgcgcagcta

SEQ ID NO: 61655 - DNA, 15 bp, Homo sapiens
ccggtgcgcagctag

SEQ ID NO: 61656 - DNA, 15 bp, Homo sapiens
cggtgcgcagctagg

SEQ ID NO: 61657 - DNA, 15 bp, Homo sapiens
ggtgcgcagctaggt

SEQ ID NO: 61658 - DNA, 15 bp, Homo sapiens
gtgcgcagctaggtc

SEQ ID NO: 61659 - DNA, 15 bp, Homo sapiens
tgcgcagctaggtcg

SEQ ID NO: 61660 - DNA, 15 bp, Homo sapiens
gcgcagctaggtcgg

SEQ ID NO: 61661 - DNA, 15 bp, Homo sapiens
cgcagctaggtcgga

SEQ ID NO: 61662 - DNA, 15 bp, Homo sapiens
gcagctaggtcggaa

SEQ ID NO: 61663 - DNA, 15 bp, Homo sapiens
cagctaggtcggaag

SEQ ID NO: 61664 - DNA, 15 bp, Homo sapiens
agctaggtcggaagg

SEQ ID NO: 61665 - DNA, 15 bp, Homo sapiens
gctaggtcggaaggc

SEQ ID NO: 61666 - DNA, 15 bp, Homo sapiens
ctaggtcggaaggcg

SEQ ID NO: 61667 - DNA, 15 bp, Homo sapiens
taggtcggaaggcga

SEQ ID NO: 61668 - DNA, 15 bp, Homo sapiens
aggtcggaaggcgag

SEQ ID NO: 61669 - DNA, 15 bp, Homo sapiens
ggtcggaaggcgagc

SEQ ID NO: 61670 - DNA, 15 bp, Homo sapiens
gtcggaaggcgagcc

SEQ ID NO: 61671 - DNA, 15 bp, Homo sapiens
tcggaaggcgagccg

SEQ ID NO: 61672 - DNA, 15 bp, Homo sapiens
cggaaggcgagccgc

SEQ ID NO: 61673 - DNA, 15 bp, Homo sapiens
ggaaggcgagccgcg

SEQ ID NO: 61674 - DNA, 15 bp, Homo sapiens
gaaggcgagccgcgg

SEQ ID NO: 61675 - DNA, 15 bp, Homo sapiens
aaggcgagccgcgga

SEQ ID NO: 61676 - DNA, 15 bp, Homo sapiens
aggcgagccgcggag

SEQ ID NO: 61677 - DNA, 15 bp, Homo sapiens
ggcgagccgcggaga

SEQ ID NO: 61678 - DNA, 15 bp, Homo sapiens
gcgagccgcggagag

SEQ ID NO: 61679 - DNA, 15 bp, Homo sapiens
cgagccgcggagagc

SEQ ID NO: 61680 - DNA, 15 bp, Homo sapiens
gagccgcggagagcg

SEQ ID NO: 61681 - DNA, 15 bp, Homo sapiens
agccgcggagagcgg

SEQ ID NO: 61682 - DNA, 15 bp, Homo sapiens
gccgcggagagcgga

SEQ ID NO: 61683 - DNA, 15 bp, Homo sapiens
ccgcggagagcggag

SEQ ID NO: 61684 - DNA, 15 bp, Homo sapiens
cgcggagagcggagc

SEQ ID NO: 61685 - DNA, 15 bp, Homo sapiens
gcggagagcggagcc

SEQ ID NO: 61686 - DNA, 15 bp, Homo sapiens
cggagagcggagccg

SEQ ID NO: 61687 - DNA, 15 bp, Homo sapiens
ggagagcggagccgc

SEQ ID NO: 61688 - DNA, 15 bp, Homo sapiens
gagagcggagccgcg

SEQ ID NO: 61689 - DNA, 15 bp, Homo sapiens
agagcggagccgcgg

SEQ ID NO: 61690 - DNA, 15 bp, Homo sapiens
gagcggagccgcggg

SEQ ID NO: 61691 - DNA, 15 bp, Homo sapiens
agcggagccgcgggc

SEQ ID NO: 61692 - DNA, 15 bp, Homo sapiens
gcggagccgcgggcc

SEQ ID NO: 61693 - DNA, 15 bp, Homo sapiens
cggagccgcgggcca

SEQ ID NO: 61694 - DNA, 15 bp, Homo sapiens
ggagccgcgggccaa

SEQ ID NO: 61695 - DNA, 15 bp, Homo sapiens
gagccgcgggccaag

SEQ ID NO: 61696 - DNA, 15 bp, Homo sapiens
agccgcgggccaagg

SEQ ID NO: 61697 - DNA, 15 bp, Homo sapiens
gccgcgggccaaggc

SEQ ID NO: 61698 - DNA, 15 bp, Homo sapiens
ccgcgggccaaggca

SEQ ID NO: 61699 - DNA, 15 bp, Homo sapiens
cgcgggccaaggcag

SEQ ID NO: 61700 - DNA, 15 bp, Homo sapiens
gcgggccaaggcagg

SEQ ID NO: 61701 - DNA, 15 bp, Homo sapiens
cgggccaaggcaggg

SEQ ID NO: 61702 - DNA, 15 bp, Homo sapiens
gggccaaggcaggga

SEQ ID NO: 61703 - DNA, 15 bp, Homo sapiens
ggccaaggcagggac

SEQ ID NO: 61704 - DNA, 15 bp, Homo sapiens
gccaaggcagggacg

SEQ ID NO: 61705 - DNA, 15 bp, Homo sapiens
ccaaggcagggacgg

SEQ ID NO: 61706 - DNA, 15 bp, Homo sapiens
caaggcagggacggg

SEQ ID NO: 61707 - DNA, 15 bp, Homo sapiens
aaggcagggacggga

SEQ ID NO: 61708 - DNA, 15 bp, Homo sapiens
aggcagggacgggag

SEQ ID NO: 61709 - DNA, 15 bp, Homo sapiens
ggcagggacgggagg

SEQ ID NO: 61710 - DNA, 15 bp, Homo sapiens
gcagggacgggaggg

SEQ ID NO: 61711 - DNA, 15 bp, Homo sapiens
cagggacgggagggg

SEQ ID NO: 61712 - DNA, 15 bp, Homo sapiens
agggacgggagggga

SEQ ID NO: 61713 - DNA, 15 bp, Homo sapiens
gggacgggaggggag

SEQ ID NO: 61714 - DNA, 15 bp, Homo sapiens
ggacgggaggggagg

SEQ ID NO: 61715 - DNA, 15 bp, Homo sapiens
gacgggaggggaggc

SEQ ID NO: 61716 - DNA, 15 bp, Homo sapiens
acgggaggggaggcg

SEQ ID NO: 61717 - DNA, 15 bp, Homo sapiens
cgggaggggaggcgg

SEQ ID NO: 61718 - DNA, 15 bp, Homo sapiens
gggaggggaggcggc

SEQ ID NO: 61719 - DNA, 15 bp, Homo sapiens
ggaggggaggcggca

SEQ ID NO: 61720 - DNA, 15 bp, Homo sapiens
gaggggaggcggcag

SEQ ID NO: 61721 - DNA, 15 bp, Homo sapiens
aggggaggcggcagg

SEQ ID NO: 61722 - DNA, 15 bp, Homo sapiens
ggggaggcggcaggt

SEQ ID NO: 61723 - DNA, 15 bp, Homo sapiens
gggaggcggcaggtt

SEQ ID NO: 61724 - DNA, 15 bp, Homo sapiens
ggaggcggcaggttg

SEQ ID NO: 61725 - DNA, 15 bp, Homo sapiens
gaggcggcaggttgg

SEQ ID NO: 61726 - DNA, 15 bp, Homo sapiens
aggcggcaggttggg

SEQ ID NO: 61727 - DNA, 15 bp, Homo sapiens
ggcggcaggttgggc

SEQ ID NO: 61728 - DNA, 15 bp, Homo sapiens
gcggcaggttgggcg

SEQ ID NO: 61729 - DNA, 15 bp, Homo sapiens
cggcaggttgggcgc

SEQ ID NO: 61730 - DNA, 15 bp, Homo sapiens
ggcaggttgggcgct

SEQ ID NO: 61731 - DNA, 15 bp, Homo sapiens
gcaggttgggcgctc

SEQ ID NO: 61732 - DNA, 15 bp, Homo sapiens
caggttgggcgctcc

SEQ ID NO: 61733 - DNA, 15 bp, Homo sapiens
aggttgggcgctccg

SEQ ID NO: 61734 - DNA, 15 bp, Homo sapiens
ggttgggcgctccgc

SEQ ID NO: 61735 - DNA, 15 bp, Homo sapiens
gttgggcgctccgct

SEQ ID NO: 61736 - DNA, 15 bp, Homo sapiens
ttgggcgctccgctg

SEQ ID NO: 61737 - DNA, 15 bp, Homo sapiens
tgggcgctccgctgc

SEQ ID NO: 61738 - DNA, 15 bp, Homo sapiens
gggcgctccgctgct

SEQ ID NO: 61739 - DNA, 15 bp, Homo sapiens
ggcgctccgctgctg

SEQ ID NO: 61740 - DNA, 15 bp, Homo sapiens
gcgctccgctgctgc

SEQ ID NO: 61741 - DNA, 15 bp, Homo sapiens
cgctccgctgctgct

SEQ ID NO: 61742 - DNA, 15 bp, Homo sapiens
gctccgctgctgctc

SEQ ID NO: 61743 - DNA, 15 bp, Homo sapiens
ctccgctgctgctcg

SEQ ID NO: 61744 - DNA, 15 bp, Homo sapiens
tccgctgctgctcgg

SEQ ID NO: 61745 - DNA, 15 bp, Homo sapiens
ccgctgctgctcggt

SEQ ID NO: 61746 - DNA, 15 bp, Homo sapiens
cgctgctgctcggtg

SEQ ID NO: 61747 - DNA, 15 bp, Homo sapiens
gctgctgctcggtgc

SEQ ID NO: 61748 - DNA, 15 bp, Homo sapiens
ctgctgctcggtgct

SEQ ID NO: 61749 - DNA, 15 bp, Homo sapiens
tgctgctcggtgctg

SEQ ID NO: 61750 - DNA, 15 bp, Homo sapiens
gctgctcggtgctgc

SEQ ID NO: 61751 - DNA, 15 bp, Homo sapiens
ctgctcggtgctgct

SEQ ID NO: 61752 - DNA, 15 bp, Homo sapiens
tgctcggtgctgctt

SEQ ID NO: 61753 - DNA, 15 bp, Homo sapiens
gctcggtgctgcttc

SEQ ID NO: 61754 - DNA, 15 bp, Homo sapiens
ctcggtgctgcttcc

SEQ ID NO: 61755 - DNA, 15 bp, Homo sapiens
tcggtgctgcttccc

SEQ ID NO: 61756 - DNA, 15 bp, Homo sapiens
cggtgctgcttcccc

SEQ ID NO: 61757 - DNA, 15 bp, Homo sapiens
ggtgctgcttccccg

SEQ ID NO: 61758 - DNA, 15 bp, Homo sapiens
gtgctgcttccccgg

SEQ ID NO: 61759 - DNA, 15 bp, Homo sapiens
tgctgcttccccgga

SEQ ID NO: 61760 - DNA, 15 bp, Homo sapiens
gctgcttccccggag

SEQ ID NO: 61761 - DNA, 15 bp, Homo sapiens
ctgcttccccggagc

SEQ ID NO: 61762 - DNA, 15 bp, Homo sapiens
tgcttccccggagcc

SEQ ID NO: 61763 - DNA, 15 bp, Homo sapiens
gcttccccggagccg

SEQ ID NO: 61764 - DNA, 15 bp, Homo sapiens
cttccccggagccgc

SEQ ID NO: 61765 - DNA, 15 bp, Homo sapiens
ttccccggagccgct

SEQ ID NO: 61766 - DNA, 15 bp, Homo sapiens
tccccggagccgctt

SEQ ID NO: 61767 - DNA, 15 bp, Homo sapiens
ccccggagccgcttc

SEQ ID NO: 61768 - DNA, 15 bp, Homo sapiens
cccggagccgcttcc

SEQ ID NO: 61769 - DNA, 15 bp, Homo sapiens
ccggagccgcttcct

SEQ ID NO: 61770 - DNA, 15 bp, Homo sapiens
cggagccgcttcctc

SEQ ID NO: 61771 - DNA, 15 bp, Homo sapiens
ggagccgcttcctca

SEQ ID NO: 61772 - DNA, 15 bp, Homo sapiens
gagccgcttcctcat

SEQ ID NO: 61773 - DNA, 15 bp, Homo sapiens
agccgcttcctcatc

SEQ ID NO: 61774 - DNA, 15 bp, Homo sapiens
gccgcttcctcatcc

SEQ ID NO: 61775 - DNA, 15 bp, Homo sapiens
ccgcttcctcatcct

SEQ ID NO: 61776 - DNA, 15 bp, Homo sapiens
cgcttcctcatcctg

SEQ ID NO: 61777 - DNA, 15 bp, Homo sapiens
gcttcctcatcctgc

SEQ ID NO: 61778 - DNA, 15 bp, Homo sapiens
cttcctcatcctgcg

SEQ ID NO: 61779 - DNA, 15 bp, Homo sapiens
ttcctcatcctgcgg

SEQ ID NO: 61780 - DNA, 15 bp, Homo sapiens
tcctcatcctgcggg

SEQ ID NO: 61781 - DNA, 15 bp, Homo sapiens
cctcatcctgcgggg

SEQ ID NO: 61782 - DNA, 15 bp, Homo sapiens
ctcatcctgcggggg

SEQ ID NO: 61783 - DNA, 15 bp, Homo sapiens
tcatcctgcgggggc

SEQ ID NO: 61784 - DNA, 15 bp, Homo sapiens
catcctgcgggggct

SEQ ID NO: 61785 - DNA, 15 bp, Homo sapiens
atcctgcgggggctg

SEQ ID NO: 61786 - DNA, 15 bp, Homo sapiens
tcctgcgggggctgc

SEQ ID NO: 61787 - DNA, 15 bp, Homo sapiens
cctgcgggggctgcc

SEQ ID NO: 61788 - DNA, 15 bp, Homo sapiens
ctgcgggggctgccc

SEQ ID NO: 61789 - DNA, 15 bp, Homo sapiens
tgcgggggctgcccc

SEQ ID NO: 61790 - DNA, 15 bp, Homo sapiens
gcgggggctgccccg

SEQ ID NO: 61791 - DNA, 15 bp, Homo sapiens
cgggggctgccccgc

SEQ ID NO: 61792 - DNA, 15 bp, Homo sapiens
gggggctgccccgcc

SEQ ID NO: 61793 - DNA, 15 bp, Homo sapiens
ggggctgccccgccg

SEQ ID NO: 61794 - DNA, 15 bp, Homo sapiens
gggctgccccgccgc

SEQ ID NO: 61795 - DNA, 15 bp, Homo sapiens
ggctgccccgccgcc

SEQ ID NO: 61796 - DNA, 15 bp, Homo sapiens
gctgccccgccgccg

SEQ ID NO: 61797 - DNA, 15 bp, Homo sapiens
ctgccccgccgccgg

SEQ ID NO: 61798 - DNA, 15 bp, Homo sapiens
tgccccgccgccggg

SEQ ID NO: 61799 - DNA, 15 bp, Homo sapiens
gccccgccgccgggg

SEQ ID NO: 61800 - DNA, 15 bp, Homo sapiens
ccccgccgccggggt

SEQ ID NO: 61801 - DNA, 15 bp, Homo sapiens
cccgccgccggggtg

SEQ ID NO: 61802 - DNA, 15 bp, Homo sapiens
ccgccgccggggtgc

SEQ ID NO: 61803 - DNA, 15 bp, Homo sapiens
cgccgccggggtgcc

SEQ ID NO: 61804 - DNA, 15 bp, Homo sapiens
gccgccggggtgccg

SEQ ID NO: 61805 - DNA, 15 bp, Homo sapiens
ccgccggggtgccgg

SEQ ID NO: 61806 - DNA, 15 bp, Homo sapiens
cgccggggtgccggg

SEQ ID NO: 61807 - DNA, 15 bp, Homo sapiens
gccggggtgccgggg

SEQ ID NO: 61808 - DNA, 15 bp, Homo sapiens
ccggggtgccggggt

SEQ ID NO: 61809 - DNA, 15 bp, Homo sapiens
cggggtgccggggtg

SEQ ID NO: 61810 - DNA, 15 bp, Homo sapiens
ggggtgccggggtga

SEQ ID NO: 61811 - DNA, 15 bp, Homo sapiens
gggtgccggggtgag

SEQ ID NO: 61812 - DNA, 15 bp, Homo sapiens
ggtgccggggtgagc

SEQ ID NO: 61813 - DNA, 15 bp, Homo sapiens
gtgccggggtgagcg

SEQ ID NO: 61814 - DNA, 15 bp, Homo sapiens
tgccggggtgagcgc

SEQ ID NO: 61815 - DNA, 15 bp, Homo sapiens
gccggggtgagcgcg

SEQ ID NO: 61816 - DNA, 15 bp, Homo sapiens
ccggggtgagcgcgg

SEQ ID NO: 61817 - DNA, 15 bp, Homo sapiens
cggggtgagcgcggc

SEQ ID NO: 61818 - DNA, 15 bp, Homo sapiens
ggggtgagcgcggcg

SEQ ID NO: 61819 - DNA, 15 bp, Homo sapiens
gggtgagcgcggcgg

SEQ ID NO: 61820 - DNA, 15 bp, Homo sapiens
ggtgagcgcggcggg

SEQ ID NO: 61821 - DNA, 15 bp, Homo sapiens
gtgagcgcggcggga

SEQ ID NO: 61822 - DNA, 15 bp, Homo sapiens
tgagcgcggcgggag

SEQ ID NO: 61823 - DNA, 15 bp, Homo sapiens
gagcgcggcgggagc

SEQ ID NO: 61824 - DNA, 15 bp, Homo sapiens
agcgcggcgggagcc

SEQ ID NO: 61825 - DNA, 15 bp, Homo sapiens
gcgcggcgggagcca

SEQ ID NO: 61826 - DNA, 15 bp, Homo sapiens
cgcggcgggagccag

SEQ ID NO: 61827 - DNA, 15 bp, Homo sapiens
gcggcgggagccagg

SEQ ID NO: 61828 - DNA, 15 bp, Homo sapiens
cggcgggagccaggg

SEQ ID NO: 61829 - DNA, 15 bp, Homo sapiens
ggcgggagccagggc

SEQ ID NO: 61830 - DNA, 15 bp, Homo sapiens
gcgggagccagggct

SEQ ID NO: 61831 - DNA, 15 bp, Homo sapiens
cgggagccagggctg

SEQ ID NO: 61832 - DNA, 15 bp, Homo sapiens
gggagccagggctgg

SEQ ID NO: 61833 - DNA, 15 bp, Homo sapiens
ggagccagggctggg

SEQ ID NO: 61834 - DNA, 15 bp, Homo sapiens
gagccagggctgggg

SEQ ID NO: 61835 - DNA, 15 bp, Homo sapiens
agccagggctggggt

SEQ ID NO: 61836 - DNA, 15 bp, Homo sapiens
gccagggctggggtg

SEQ ID NO: 61837 - DNA, 15 bp, Homo sapiens
ccagggctggggtgg

SEQ ID NO: 61838 - DNA, 15 bp, Homo sapiens
cagggctggggtggc

SEQ ID NO: 61839 - DNA, 15 bp, Homo sapiens
agggctggggtggcg

SEQ ID NO: 61840 - DNA, 15 bp, Homo sapiens
gggctggggtggcga

SEQ ID NO: 61841 - DNA, 15 bp, Homo sapiens
ggctggggtggcgaa

SEQ ID NO: 61842 - DNA, 15 bp, Homo sapiens
gctggggtggcgaac

SEQ ID NO: 61843 - DNA, 15 bp, Homo sapiens
ctggggtggcgaacc

SEQ ID NO: 61844 - DNA, 15 bp, Homo sapiens
tggggtggcgaacct

SEQ ID NO: 61845 - DNA, 15 bp, Homo sapiens
ggggtggcgaacctc

SEQ ID NO: 61846 - DNA, 15 bp, Homo sapiens
gggtggcgaacctcg

SEQ ID NO: 61847 - DNA, 15 bp, Homo sapiens
ggtggcgaacctcgg

SEQ ID NO: 61848 - DNA, 15 bp, Homo sapiens
gtggcgaacctcgga

SEQ ID NO: 61849 - DNA, 15 bp, Homo sapiens
tggcgaacctcggag

SEQ ID NO: 61850 - DNA, 15 bp, Homo sapiens
ggcgaacctcggagg

SEQ ID NO: 61851 - DNA, 15 bp, Homo sapiens
gcgaacctcggaggg

SEQ ID NO: 61852 - DNA, 15 bp, Homo sapiens
cgaacctcggagggg

SEQ ID NO: 61853 - DNA, 15 bp, Homo sapiens
gaacctcggaggggg

SEQ ID NO: 61854 - DNA, 15 bp, Homo sapiens
aacctcggagggggc

SEQ ID NO: 61855 - DNA, 15 bp, Homo sapiens
acctcggagggggct

SEQ ID NO: 61856 - DNA, 15 bp, Homo sapiens
cctcggagggggctc

SEQ ID NO: 61857 - DNA, 15 bp, Homo sapiens
ctcggagggggctct

SEQ ID NO: 61858 - DNA, 15 bp, Homo sapiens
tcggagggggctctc

SEQ ID NO: 61859 - DNA, 15 bp, Homo sapiens
cggagggggctctcc

SEQ ID NO: 61860 - DNA, 15 bp, Homo sapiens
ggagggggctctccc

SEQ ID NO: 61861 - DNA, 15 bp, Homo sapiens
gagggggctctccca

SEQ ID NO: 61862 - DNA, 15 bp, Homo sapiens
agggggctctcccag

SEQ ID NO: 61863 - DNA, 15 bp, Homo sapiens
gggggctctcccagg

SEQ ID NO: 61864 - DNA, 15 bp, Homo sapiens
ggggctctcccagga

SEQ ID NO: 61865 - DNA, 15 bp, Homo sapiens
gggctctcccaggaa

SEQ ID NO: 61866 - DNA, 15 bp, Homo sapiens
ggctctcccaggaag

SEQ ID NO: 61867 - DNA, 15 bp, Homo sapiens
gctctcccaggaagc

SEQ ID NO: 61868 - DNA, 15 bp, Homo sapiens
ctctcccaggaagcc

SEQ ID NO: 61869 - DNA, 15 bp, Homo sapiens
tctcccaggaagccc

SEQ ID NO: 61870 - DNA, 15 bp, Homo sapiens
ctcccaggaagccct

SEQ ID NO: 61871 - DNA, 15 bp, Homo sapiens
tcccaggaagccctg

SEQ ID NO: 61872 - DNA, 15 bp, Homo sapiens
cccaggaagccctgc

SEQ ID NO: 61873 - DNA, 15 bp, Homo sapiens
ccaggaagccctgcg

SEQ ID NO: 61874 - DNA, 15 bp, Homo sapiens
caggaagccctgcgg

SEQ ID NO: 61875 - DNA, 15 bp, Homo sapiens
aggaagccctgcggt

SEQ ID NO: 61876 - DNA, 15 bp, Homo sapiens
ggaagccctgcggtt

SEQ ID NO: 61877 - DNA, 15 bp, Homo sapiens
gaagccctgcggtta

SEQ ID NO: 61878 - DNA, 15 bp, Homo sapiens
aagccctgcggttag

SEQ ID NO: 61879 - DNA, 15 bp, Homo sapiens
agccctgcggttagc

SEQ ID NO: 61880 - DNA, 15 bp, Homo sapiens
gccctgcggttagcg

SEQ ID NO: 61881 - DNA, 15 bp, Homo sapiens
ccctgcggttagcgc

SEQ ID NO: 61882 - DNA, 15 bp, Homo sapiens
cctgcggttagcgcc

SEQ ID NO: 61883 - DNA, 15 bp, Homo sapiens
ctgcggttagcgccc

SEQ ID NO: 61884 - DNA, 15 bp, Homo sapiens
tgcggttagcgcccg

SEQ ID NO: 61885 - DNA, 15 bp, Homo sapiens
gcggttagcgcccgc

SEQ ID NO: 61886 - DNA, 15 bp, Homo sapiens
cggttagcgcccgcg

SEQ ID NO: 61887 - DNA, 15 bp, Homo sapiens
ggttagcgcccgcgc

SEQ ID NO: 61888 - DNA, 15 bp, Homo sapiens
gttagcgcccgcgct

SEQ ID NO: 61889 - DNA, 15 bp, Homo sapiens
ttagcgcccgcgctt

SEQ ID NO: 61890 - DNA, 15 bp, Homo sapiens
tagcgcccgcgcttc

SEQ ID NO: 61891 - DNA, 15 bp, Homo sapiens
agcgcccgcgcttcc

SEQ ID NO: 61892 - DNA, 15 bp, Homo sapiens
gcgcccgcgcttccc

SEQ ID NO: 61893 - DNA, 15 bp, Homo sapiens
cgcccgcgcttcccc

SEQ ID NO: 61894 - DNA, 15 bp, Homo sapiens
gcccgcgcttcccca

SEQ ID NO: 61895 - DNA, 15 bp, Homo sapiens
cccgcgcttccccac

SEQ ID NO: 61896 - DNA, 15 bp, Homo sapiens
ccgcgcttccccacc

SEQ ID NO: 61897 - DNA, 15 bp, Homo sapiens
cgcgcttccccacca

SEQ ID NO: 61898 - DNA, 15 bp, Homo sapiens
gcgcttccccaccag

SEQ ID NO: 61899 - DNA, 15 bp, Homo sapiens
cgcttccccaccagt

SEQ ID NO: 61900 - DNA, 15 bp, Homo sapiens
gcttccccaccagtg

SEQ ID NO: 61901 - DNA, 15 bp, Homo sapiens
cttccccaccagtgg

SEQ ID NO: 61902 - DNA, 15 bp, Homo sapiens
ttccccaccagtggc

SEQ ID NO: 61903 - DNA, 15 bp, Homo sapiens
tccccaccagtggct

SEQ ID NO: 61904 - DNA, 15 bp, Homo sapiens
ccccaccagtggctg

SEQ ID NO: 61905 - DNA, 15 bp, Homo sapiens
cccaccagtggctgc

SEQ ID NO: 61906 - DNA, 15 bp, Homo sapiens
ccaccagtggctgcg

SEQ ID NO: 61907 - DNA, 15 bp, Homo sapiens
caccagtggctgcgc

SEQ ID NO: 61908 - DNA, 15 bp, Homo sapiens
accagtggctgcgca

SEQ ID NO: 61909 - DNA, 15 bp, Homo sapiens
ccagtggctgcgcaa

SEQ ID NO: 61910 - DNA, 15 bp, Homo sapiens
cagtggctgcgcaag

SEQ ID NO: 61911 - DNA, 15 bp, Homo sapiens
agtggctgcgcaagc

SEQ ID NO: 61912 - DNA, 15 bp, Homo sapiens
gtggctgcgcaagct

SEQ ID NO: 61913 - DNA, 15 bp, Homo sapiens
tggctgcgcaagctg

SEQ ID NO: 61914 - DNA, 15 bp, Homo sapiens
ggctgcgcaagctgg

SEQ ID NO: 61915 - DNA, 15 bp, Homo sapiens
gctgcgcaagctggg

SEQ ID NO: 61916 - DNA, 15 bp, Homo sapiens
ctgcgcaagctggga

SEQ ID NO: 61917 - DNA, 15 bp, Homo sapiens
tgcgcaagctgggaa

SEQ ID NO: 61918 - DNA, 15 bp, Homo sapiens
gcgcaagctgggaag

SEQ ID NO: 61919 - DNA, 15 bp, Homo sapiens
cgcaagctgggaagc

SEQ ID NO: 61920 - DNA, 15 bp, Homo sapiens
gcaagctgggaagcg

SEQ ID NO: 61921 - DNA, 15 bp, Homo sapiens
caagctgggaagcga

SEQ ID NO: 61922 - DNA, 15 bp, Homo sapiens
aagctgggaagcgaa

SEQ ID NO: 61923 - DNA, 15 bp, Homo sapiens
agctgggaagcgaag

SEQ ID NO: 61924 - DNA, 15 bp, Homo sapiens
gctgggaagcgaaga

SEQ ID NO: 61925 - DNA, 15 bp, Homo sapiens
ctgggaagcgaagag

SEQ ID NO: 61926 - DNA, 15 bp, Homo sapiens
tgggaagcgaagagg

SEQ ID NO: 61927 - DNA, 15 bp, Homo sapiens
gggaagcgaagaggt

SEQ ID NO: 61928 - DNA, 15 bp, Homo sapiens
ggaagcgaagaggtc

SEQ ID NO: 61929 - DNA, 15 bp, Homo sapiens
gaagcgaagaggtca

SEQ ID NO: 61930 - DNA, 15 bp, Homo sapiens
aagcgaagaggtcac

SEQ ID NO: 61931 - DNA, 15 bp, Homo sapiens
agcgaagaggtcacg

SEQ ID NO: 61932 - DNA, 15 bp, Homo sapiens
gcgaagaggtcacgt

SEQ ID NO: 61933 - DNA, 15 bp, Homo sapiens
cgaagaggtcacgtg

SEQ ID NO: 61934 - DNA, 15 bp, Homo sapiens
gaagaggtcacgtgt

SEQ ID NO: 61935 - DNA, 15 bp, Homo sapiens
aagaggtcacgtgtt

SEQ ID NO: 61936 - DNA, 15 bp, Homo sapiens
agaggtcacgtgttg

SEQ ID NO: 61937 - DNA, 15 bp, Homo sapiens
gaggtcacgtgttgg

SEQ ID NO: 61938 - DNA, 15 bp, Homo sapiens
aggtcacgtgttggc

SEQ ID NO: 61939 - DNA, 15 bp, Homo sapiens
ggtcacgtgttggcg

SEQ ID NO: 61940 - DNA, 15 bp, Homo sapiens
gtcacgtgttggcgg

SEQ ID NO: 61941 - DNA, 15 bp, Homo sapiens
tcacgtgttggcgga

SEQ ID NO: 61942 - DNA, 15 bp, Homo sapiens
cacgtgttggcggaa

SEQ ID NO: 61943 - DNA, 15 bp, Homo sapiens
acgtgttggcggaaa

SEQ ID NO: 61944 - DNA, 15 bp, Homo sapiens
cgtgttggcggaaag

SEQ ID NO: 61945 - DNA, 15 bp, Homo sapiens
gtgttggcggaaagt

SEQ ID NO: 61946 - DNA, 15 bp, Homo sapiens
tgttggcggaaagta

SEQ ID NO: 61947 - DNA, 15 bp, Homo sapiens
gttggcggaaagtaa

SEQ ID NO: 61948 - DNA, 15 bp, Homo sapiens
ttggcggaaagtaac

SEQ ID NO: 61949 - DNA, 15 bp, Homo sapiens
tggcggaaagtaact

SEQ ID NO: 61950 - DNA, 15 bp, Homo sapiens
ggcggaaagtaactt

SEQ ID NO: 61951 - DNA, 15 bp, Homo sapiens
gcggaaagtaacttg

SEQ ID NO: 61952 - DNA, 15 bp, Homo sapiens
cggaaagtaacttgg

SEQ ID NO: 61953 - DNA, 15 bp, Homo sapiens
ggaaagtaacttgga

SEQ ID NO: 61954 - DNA, 15 bp, Homo sapiens
gaaagtaacttggag

SEQ ID NO: 61955 - DNA, 15 bp, Homo sapiens
aaagtaacttggagg

SEQ ID NO: 61956 - DNA, 15 bp, Homo sapiens
aagtaacttggaggc

SEQ ID NO: 61957 - DNA, 15 bp, Homo sapiens
agtaacttggaggcg

SEQ ID NO: 61958 - DNA, 15 bp, Homo sapiens
gtaacttggaggcga

SEQ ID NO: 61959 - DNA, 15 bp, Homo sapiens
taacttggaggcgaa

SEQ ID NO: 61960 - DNA, 15 bp, Homo sapiens
aacttggaggcgaaa

SEQ ID NO: 61961 - DNA, 15 bp, Homo sapiens
acttggaggcgaaag

SEQ ID NO: 61962 - DNA, 15 bp, Homo sapiens
cttggaggcgaaagg

SEQ ID NO: 61963 - DNA, 15 bp, Homo sapiens
ttggaggcgaaagga

SEQ ID NO: 61964 - DNA, 15 bp, Homo sapiens
tggaggcgaaaggat

SEQ ID NO: 61965 - DNA, 15 bp, Homo sapiens
ggaggcgaaaggatg

SEQ ID NO: 61966 - DNA, 15 bp, Homo sapiens
gaggcgaaaggatga

SEQ ID NO: 61967 - DNA, 15 bp, Homo sapiens
aggcgaaaggatgaa

SEQ ID NO: 61968 - DNA, 15 bp, Homo sapiens
ggcgaaaggatgaac

SEQ ID NO: 61969 - DNA, 15 bp, Homo sapiens
gcgaaaggatgaact

SEQ ID NO: 61970 - DNA, 15 bp, Homo sapiens
cgaaaggatgaactt

SEQ ID NO: 61971 - DNA, 15 bp, Homo sapiens
gaaaggatgaacttt

SEQ ID NO: 61972 - DNA, 15 bp, Homo sapiens
aaaggatgaactttg

SEQ ID NO: 61973 - DNA, 15 bp, Homo sapiens
aaggatgaactttga

SEQ ID NO: 61974 - DNA, 15 bp, Homo sapiens
aggatgaactttgag

SEQ ID NO: 61975 - DNA, 15 bp, Homo sapiens
ggatgaactttgaga

SEQ ID NO: 61976 - DNA, 15 bp, Homo sapiens
gatgaactttgagaa

SEQ ID NO: 61977 - DNA, 15 bp, Homo sapiens
atgaactttgagaag

SEQ ID NO: 61978 - DNA, 15 bp, Homo sapiens
tgaactttgagaaga

SEQ ID NO: 61979 - DNA, 15 bp, Homo sapiens
gaactttgagaagag

SEQ ID NO: 61980 - DNA, 15 bp, Homo sapiens
aactttgagaagagg

SEQ ID NO: 61981 - DNA, 15 bp, Homo sapiens
actttgagaagagga

SEQ ID NO: 61982 - DNA, 15 bp, Homo sapiens
ctttgagaagaggaa

SEQ ID NO: 61983 - DNA, 15 bp, Homo sapiens
tttgagaagaggaaa

SEQ ID NO: 61984 - DNA, 15 bp, Homo sapiens
ttgagaagaggaaaa

SEQ ID NO: 61985 - DNA, 15 bp, Homo sapiens
tgagaagaggaaaaa

SEQ ID NO: 61986 - DNA, 15 bp, Homo sapiens
gagaagaggaaaaaa

SEQ ID NO: 61987 - DNA, 15 bp, Homo sapiens
agaagaggaaaaaaa

SEQ ID NO: 61988 - DNA, 15 bp, Homo sapiens
gaagaggaaaaaaag

SEQ ID NO: 61989 - DNA, 15 bp, Homo sapiens
aagaggaaaaaaagc

SEQ ID NO: 61990 - DNA, 15 bp, Homo sapiens
agaggaaaaaaagca

SEQ ID NO: 61991 - DNA, 15 bp, Homo sapiens
gaggaaaaaaagcac

SEQ ID NO: 61992 - DNA, 15 bp, Homo sapiens
aggaaaaaaagcaca

SEQ ID NO: 61993 - DNA, 15 bp, Homo sapiens
ggaaaaaaagcacaa

SEQ ID NO: 61994 - DNA, 15 bp, Homo sapiens
gaaaaaaagcacaat

SEQ ID NO: 61995 - DNA, 15 bp, Homo sapiens
aaaaaaagcacaatg

SEQ ID NO: 61996 - DNA, 15 bp, Homo sapiens
aaaaaagcacaatga

SEQ ID NO: 61997 - DNA, 15 bp, Homo sapiens
aaaaagcacaatgaa

SEQ ID NO: 61998 - DNA, 15 bp, Homo sapiens
aaaagcacaatgaaa

SEQ ID NO: 61999 - DNA, 15 bp, Homo sapiens
aaagcacaatgaaac

SEQ ID NO: 62000 - DNA, 15 bp, Homo sapiens
aagcacaatgaaaca

SEQ ID NO: 62001 - DNA, 15 bp, Homo sapiens
agcacaatgaaacaa

SEQ ID NO: 62002 - DNA, 15 bp, Homo sapiens
gcacaatgaaacaaa

SEQ ID NO: 62003 - DNA, 15 bp, Homo sapiens
cacaatgaaacaaac

SEQ ID NO: 62004 - DNA, 15 bp, Homo sapiens
acaatgaaacaaact

SEQ ID NO: 62005 - DNA, 15 bp, Homo sapiens
caatgaaacaaacta

SEQ ID NO: 62006 - DNA, 15 bp, Homo sapiens
aatgaaacaaactac

SEQ ID NO: 62007 - DNA, 15 bp, Homo sapiens
atgaaacaaactacc

SEQ ID NO: 62008 - DNA, 15 bp, Homo sapiens
tgaaacaaactaccc

SEQ ID NO: 62009 - DNA, 15 bp, Homo sapiens
gaaacaaactacccc

SEQ ID NO: 62010 - DNA, 15 bp, Homo sapiens
aaacaaactaccccc

SEQ ID NO: 62011 - DNA, 15 bp, Homo sapiens
aacaaactaccccct

SEQ ID NO: 62012 - DNA, 15 bp, Homo sapiens
acaaactaccccctt

SEQ ID NO: 62013 - DNA, 15 bp, Homo sapiens
caaactacccccttg

SEQ ID NO: 62014 - DNA, 15 bp, Homo sapiens
aaactacccccttgg

SEQ ID NO: 62015 - DNA, 15 bp, Homo sapiens
aactacccccttgga

SEQ ID NO: 62016 - DNA, 15 bp, Homo sapiens
actacccccttggag

SEQ ID NO: 62017 - DNA, 15 bp, Homo sapiens
ctacccccttggagt

SEQ ID NO: 62018 - DNA, 15 bp, Homo sapiens
tacccccttggagtg

SEQ ID NO: 62019 - DNA, 15 bp, Homo sapiens
acccccttggagtgt

SEQ ID NO: 62020 - DNA, 15 bp, Homo sapiens
cccccttggagtgtc

SEQ ID NO: 62021 - DNA, 15 bp, Homo sapiens
ccccttggagtgtct

SEQ ID NO: 62022 - DNA, 15 bp, Homo sapiens
cccttggagtgtcta

SEQ ID NO: 62023 - DNA, 15 bp, Homo sapiens
ccttggagtgtctaa

SEQ ID NO: 62024 - DNA, 15 bp, Homo sapiens
cttggagtgtctaat

SEQ ID NO: 62025 - DNA, 15 bp, Homo sapiens
ttggagtgtctaata

SEQ ID NO: 62026 - DNA, 15 bp, Homo sapiens
tggagtgtctaatag

SEQ ID NO: 62027 - DNA, 15 bp, Homo sapiens
ggagtgtctaataga

SEQ ID NO: 62028 - DNA, 15 bp, Homo sapiens
gagtgtctaatagag

SEQ ID NO: 62029 - DNA, 15 bp, Homo sapiens
agtgtctaatagagg

SEQ ID NO: 62030 - DNA, 15 bp, Homo sapiens
gtgtctaatagaggg

SEQ ID NO: 62031 - DNA, 15 bp, Homo sapiens
tgtctaatagagggg

SEQ ID NO: 62032 - DNA, 15 bp, Homo sapiens
gtctaatagaggggg

SEQ ID NO: 62033 - DNA, 15 bp, Homo sapiens
tctaatagaggggga

SEQ ID NO: 62034 - DNA, 15 bp, Homo sapiens
ctaatagagggggag

SEQ ID NO: 62035 - DNA, 15 bp, Homo sapiens
taatagagggggagg

SEQ ID NO: 62036 - DNA, 15 bp, Homo sapiens
aatagagggggaggc

SEQ ID NO: 62037 - DNA, 15 bp, Homo sapiens
atagagggggaggcg

SEQ ID NO: 62038 - DNA, 15 bp, Homo sapiens
tagagggggaggcgg

SEQ ID NO: 62039 - DNA, 15 bp, Homo sapiens
agagggggaggcggg

SEQ ID NO: 62040 - DNA, 15 bp, Homo sapiens
gagggggaggcggga

SEQ ID NO: 62041 - DNA, 15 bp, Homo sapiens
agggggaggcgggag

SEQ ID NO: 62042 - DNA, 15 bp, Homo sapiens
gggggaggcgggagg

SEQ ID NO: 62043 - DNA, 15 bp, Homo sapiens
ggggaggcgggaggg

SEQ ID NO: 62044 - DNA, 15 bp, Homo sapiens
gggaggcgggagggg

SEQ ID NO: 62045 - DNA, 15 bp, Homo sapiens
ggaggcgggaggggg

SEQ ID NO: 62046 - DNA, 15 bp, Homo sapiens
gaggcgggagggggg

SEQ ID NO: 62047 - DNA, 15 bp, Homo sapiens
aggcgggaggggggg

SEQ ID NO: 62048 - DNA, 15 bp, Homo sapiens
ggcgggagggggggc

SEQ ID NO: 62049 - DNA, 15 bp, Homo sapiens
gcgggagggggggcg

SEQ ID NO: 62050 - DNA, 15 bp, Homo sapiens
cgggagggggggcgg

SEQ ID NO: 62051 - DNA, 15 bp, Homo sapiens
gggagggggggcgga

SEQ ID NO: 62052 - DNA, 15 bp, Homo sapiens
ggagggggggcggag

SEQ ID NO: 62053 - DNA, 15 bp, Homo sapiens
gagggggggcggagg

SEQ ID NO: 62054 - DNA, 15 bp, Homo sapiens
agggggggcggaggg

SEQ ID NO: 62055 - DNA, 15 bp, Homo sapiens
gggggggcggagggg

SEQ ID NO: 62056 - DNA, 15 bp, Homo sapiens
ggggggcggaggggc

SEQ ID NO: 62057 - DNA, 15 bp, Homo sapiens
gggggcggaggggcg

SEQ ID NO: 62058 - DNA, 15 bp, Homo sapiens
ggggcggaggggcgc

SEQ ID NO: 62059 - DNA, 15 bp, Homo sapiens
gggcggaggggcgcc

SEQ ID NO: 62060 - DNA, 15 bp, Homo sapiens
ggcggaggggcgccg

SEQ ID NO: 62061 - DNA, 15 bp, Homo sapiens
gcggaggggcgccgc

SEQ ID NO: 62062 - DNA, 15 bp, Homo sapiens
cggaggggcgccgct

SEQ ID NO: 62063 - DNA, 15 bp, Homo sapiens
ggaggggcgccgctc

SEQ ID NO: 62064 - DNA, 15 bp, Homo sapiens
gaggggcgccgctct

SEQ ID NO: 62065 - DNA, 15 bp, Homo sapiens
aggggcgccgctctc

SEQ ID NO: 62066 - DNA, 15 bp, Homo sapiens
ggggcgccgctctcc

SEQ ID NO: 62067 - DNA, 15 bp, Homo sapiens
gggcgccgctctccg

SEQ ID NO: 62068 - DNA, 15 bp, Homo sapiens
ggcgccgctctccgc

SEQ ID NO: 62069 - DNA, 15 bp, Homo sapiens
gcgccgctctccgcg

SEQ ID NO: 62070 - DNA, 15 bp, Homo sapiens
cgccgctctccgcgg

SEQ ID NO: 62071 - DNA, 15 bp, Homo sapiens
gccgctctccgcggg

SEQ ID NO: 62072 - DNA, 15 bp, Homo sapiens
ccgctctccgcggga

SEQ ID NO: 62073 - DNA, 15 bp, Homo sapiens
cgctctccgcgggag

SEQ ID NO: 62074 - DNA, 15 bp, Homo sapiens
gctctccgcgggaga

SEQ ID NO: 62075 - DNA, 15 bp, Homo sapiens
ctctccgcgggagat

SEQ ID NO: 62076 - DNA, 15 bp, Homo sapiens
tctccgcgggagatg

SEQ ID NO: 62077 - DNA, 15 bp, Homo sapiens
ctccgcgggagatgt

SEQ ID NO: 62078 - DNA, 15 bp, Homo sapiens
tccgcgggagatgtg

SEQ ID NO: 62079 - DNA, 15 bp, Homo sapiens
ccgcgggagatgtgg

SEQ ID NO: 62080 - DNA, 15 bp, Homo sapiens
cgcgggagatgtggg

SEQ ID NO: 62081 - DNA, 15 bp, Homo sapiens
gcgggagatgtgggg

SEQ ID NO: 62082 - DNA, 15 bp, Homo sapiens
cgggagatgtgggga

SEQ ID NO: 62083 - DNA, 15 bp, Homo sapiens
gggagatgtggggac

SEQ ID NO: 62084 - DNA, 15 bp, Homo sapiens
ggagatgtggggacg

SEQ ID NO: 62085 - DNA, 15 bp, Homo sapiens
gagatgtggggacga

SEQ ID NO: 62086 - DNA, 15 bp, Homo sapiens
agatgtggggacgac

SEQ ID NO: 62087 - DNA, 15 bp, Homo sapiens
gatgtggggacgact

SEQ ID NO: 62088 - DNA, 15 bp, Homo sapiens
atgtggggacgactc

SEQ ID NO: 62089 - DNA, 15 bp, Homo sapiens
tgtggggacgactcc

SEQ ID NO: 62090 - DNA, 15 bp, Homo sapiens
gtggggacgactccg

SEQ ID NO: 62091 - DNA, 15 bp, Homo sapiens
tggggacgactccgg

SEQ ID NO: 62092 - DNA, 15 bp, Homo sapiens
ggggacgactccgga

SEQ ID NO: 62093 - DNA, 15 bp, Homo sapiens
gggacgactccggaa

SEQ ID NO: 62094 - DNA, 15 bp, Homo sapiens
ggacgactccggaaa

SEQ ID NO: 62095 - DNA, 15 bp, Homo sapiens
gacgactccggaaat

SEQ ID NO: 62096 - DNA, 15 bp, Homo sapiens
acgactccggaaatc

SEQ ID NO: 62097 - DNA, 15 bp, Homo sapiens
cgactccggaaatct

SEQ ID NO: 62098 - DNA, 15 bp, Homo sapiens
gactccggaaatctc

SEQ ID NO: 62099 - DNA, 15 bp, Homo sapiens
actccggaaatctcg

SEQ ID NO: 62100 - DNA, 15 bp, Homo sapiens
ctccggaaatctcgg

SEQ ID NO: 62101 - DNA, 15 bp, Homo sapiens
tccggaaatctcggg

SEQ ID NO: 62102 - DNA, 15 bp, Homo sapiens
ccggaaatctcggga

SEQ ID NO: 62103 - DNA, 15 bp, Homo sapiens
cggaaatctcgggaa

SEQ ID NO: 62104 - DNA, 15 bp, Homo sapiens
ggaaatctcgggaaa

SEQ ID NO: 62105 - DNA, 15 bp, Homo sapiens
gaaatctcgggaaat

SEQ ID NO: 62106 - DNA, 15 bp, Homo sapiens
aaatctcgggaaata

SEQ ID NO: 62107 - DNA, 15 bp, Homo sapiens
aatctcgggaaatag

SEQ ID NO: 62108 - DNA, 15 bp, Homo sapiens
atctcgggaaatagg

SEQ ID NO: 62109 - DNA, 15 bp, Homo sapiens
tctcgggaaataggc

SEQ ID NO: 62110 - DNA, 15 bp, Homo sapiens
ctcgggaaataggca

SEQ ID NO: 62111 - DNA, 15 bp, Homo sapiens
tcgggaaataggcaa

SEQ ID NO: 62112 - DNA, 15 bp, Homo sapiens
cgggaaataggcaat

SEQ ID NO: 62113 - DNA, 15 bp, Homo sapiens
gggaaataggcaata

SEQ ID NO: 62114 - DNA, 15 bp, Homo sapiens
ggaaataggcaataa

SEQ ID NO: 62115 - DNA, 15 bp, Homo sapiens
gaaataggcaataac

SEQ ID NO: 62116 - DNA, 15 bp, Homo sapiens
aaataggcaataact

SEQ ID NO: 62117 - DNA, 15 bp, Homo sapiens
aataggcaataactc

SEQ ID NO: 62118 - DNA, 15 bp, Homo sapiens
ataggcaataactcg

SEQ ID NO: 62119 - DNA, 15 bp, Homo sapiens
taggcaataactcga

SEQ ID NO: 62120 - DNA, 15 bp, Homo sapiens
aggcaataactcgag

SEQ ID NO: 62121 - DNA, 15 bp, Homo sapiens
ggcaataactcgagc

SEQ ID NO: 62122 - DNA, 15 bp, Homo sapiens
gcaataactcgagct

SEQ ID NO: 62123 - DNA, 15 bp, Homo sapiens
caataactcgagctt

SEQ ID NO: 62124 - DNA, 15 bp, Homo sapiens
aataactcgagcttt

SEQ ID NO: 62125 - DNA, 15 bp, Homo sapiens
ataactcgagctttg

SEQ ID NO: 62126 - DNA, 15 bp, Homo sapiens
taactcgagctttgg

SEQ ID NO: 62127 - DNA, 15 bp, Homo sapiens
aactcgagctttggc

SEQ ID NO: 62128 - DNA, 15 bp, Homo sapiens
actcgagctttggca

SEQ ID NO: 62129 - DNA, 15 bp, Homo sapiens
ctcgagctttggcaa

SEQ ID NO: 62130 - DNA, 15 bp, Homo sapiens
tcgagctttggcaac

SEQ ID NO: 62131 - DNA, 15 bp, Homo sapiens
cgagctttggcaacg

SEQ ID NO: 62132 - DNA, 15 bp, Homo sapiens
gagctttggcaacgt

SEQ ID NO: 62133 - DNA, 15 bp, Homo sapiens
agctttggcaacgtc

SEQ ID NO: 62134 - DNA, 15 bp, Homo sapiens
gctttggcaacgtcc

SEQ ID NO: 62135 - DNA, 15 bp, Homo sapiens
ctttggcaacgtccc

SEQ ID NO: 62136 - DNA, 15 bp, Homo sapiens
tttggcaacgtcccc

SEQ ID NO: 62137 - DNA, 15 bp, Homo sapiens
ttggcaacgtccccc

SEQ ID NO: 62138 - DNA, 15 bp, Homo sapiens
tggcaacgtccccca

SEQ ID NO: 62139 - DNA, 15 bp, Homo sapiens
ggcaacgtcccccag

SEQ ID NO: 62140 - DNA, 15 bp, Homo sapiens
gcaacgtcccccagc

SEQ ID NO: 62141 - DNA, 15 bp, Homo sapiens
caacgtcccccagcc

SEQ ID NO: 62142 - DNA, 15 bp, Homo sapiens
aacgtcccccagcct

SEQ ID NO: 62143 - DNA, 15 bp, Homo sapiens
acgtcccccagccta

SEQ ID NO: 62144 - DNA, 15 bp, Homo sapiens
cgtcccccagcctag

SEQ ID NO: 62145 - DNA, 15 bp, Homo sapiens
gtcccccagcctagg

SEQ ID NO: 62146 - DNA, 15 bp, Homo sapiens
tcccccagcctaggg

SEQ ID NO: 62147 - DNA, 15 bp, Homo sapiens
cccccagcctaggga

SEQ ID NO: 62148 - DNA, 15 bp, Homo sapiens
ccccagcctagggag

SEQ ID NO: 62149 - DNA, 15 bp, Homo sapiens
cccagcctagggagg

SEQ ID NO: 62150 - DNA, 15 bp, Homo sapiens
ccagcctagggaggc

SEQ ID NO: 62151 - DNA, 15 bp, Homo sapiens
cagcctagggaggcg

SEQ ID NO: 62152 - DNA, 15 bp, Homo sapiens
agcctagggaggcgc

SEQ ID NO: 62153 - DNA, 15 bp, Homo sapiens
gcctagggaggcgct

SEQ ID NO: 62154 - DNA, 15 bp, Homo sapiens
cctagggaggcgcta

SEQ ID NO: 62155 - DNA, 15 bp, Homo sapiens
ctagggaggcgctaa

SEQ ID NO: 62156 - DNA, 15 bp, Homo sapiens
tagggaggcgctaac

SEQ ID NO: 62157 - DNA, 15 bp, Homo sapiens
agggaggcgctaacg

SEQ ID NO: 62158 - DNA, 15 bp, Homo sapiens
gggaggcgctaacgc

SEQ ID NO: 62159 - DNA, 15 bp, Homo sapiens
ggaggcgctaacgca

SEQ ID NO: 62160 - DNA, 15 bp, Homo sapiens
gaggcgctaacgcaa

SEQ ID NO: 62161 - DNA, 15 bp, Homo sapiens
aggcgctaacgcaag

SEQ ID NO: 62162 - DNA, 15 bp, Homo sapiens
ggcgctaacgcaagg

SEQ ID NO: 62163 - DNA, 15 bp, Homo sapiens
gcgctaacgcaaggt

SEQ ID NO: 62164 - DNA, 15 bp, Homo sapiens
cgctaacgcaaggta

SEQ ID NO: 62165 - DNA, 15 bp, Homo sapiens
gctaacgcaaggtat

SEQ ID NO: 62166 - DNA, 15 bp, Homo sapiens
ctaacgcaaggtatc

SEQ ID NO: 62167 - DNA, 15 bp, Homo sapiens
taacgcaaggtatct

SEQ ID NO: 62168 - DNA, 15 bp, Homo sapiens
aacgcaaggtatctt

SEQ ID NO: 62169 - DNA, 15 bp, Homo sapiens
acgcaaggtatcttt

SEQ ID NO: 62170 - DNA, 15 bp, Homo sapiens
cgcaaggtatctttc

SEQ ID NO: 62171 - DNA, 15 bp, Homo sapiens
gcaaggtatctttcc

SEQ ID NO: 62172 - DNA, 15 bp, Homo sapiens
caaggtatctttcca

SEQ ID NO: 62173 - DNA, 15 bp, Homo sapiens
aaggtatctttccac

SEQ ID NO: 62174 - DNA, 15 bp, Homo sapiens
aggtatctttccact

SEQ ID NO: 62175 - DNA, 15 bp, Homo sapiens
ggtatctttccactg

SEQ ID NO: 62176 - DNA, 15 bp, Homo sapiens
gtatctttccactga

SEQ ID NO: 62177 - DNA, 15 bp, Homo sapiens
tatctttccactgaa

SEQ ID NO: 62178 - DNA, 15 bp, Homo sapiens
atctttccactgaag

SEQ ID NO: 62179 - DNA, 15 bp, Homo sapiens
tctttccactgaagc

SEQ ID NO: 62180 - DNA, 15 bp, Homo sapiens
ctttccactgaagct

SEQ ID NO: 62181 - DNA, 15 bp, Homo sapiens
tttccactgaagctg

SEQ ID NO: 62182 - DNA, 15 bp, Homo sapiens
ttccactgaagctgc

SEQ ID NO: 62183 - DNA, 15 bp, Homo sapiens
tccactgaagctgcc

SEQ ID NO: 62184 - DNA, 15 bp, Homo sapiens
ccactgaagctgccc

SEQ ID NO: 62185 - DNA, 15 bp, Homo sapiens
cactgaagctgccct

SEQ ID NO: 62186 - DNA, 15 bp, Homo sapiens
actgaagctgccctt

SEQ ID NO: 62187 - DNA, 15 bp, Homo sapiens
ctgaagctgcccttt

SEQ ID NO: 62188 - DNA, 15 bp, Homo sapiens
tgaagctgccctttg

SEQ ID NO: 62189 - DNA, 15 bp, Homo sapiens
gaagctgccctttgc

SEQ ID NO: 62190 - DNA, 15 bp, Homo sapiens
aagctgccctttgcc

SEQ ID NO: 62191 - DNA, 15 bp, Homo sapiens
agctgccctttgcct

SEQ ID NO: 62192 - DNA, 15 bp, Homo sapiens
gctgccctttgccta

SEQ ID NO: 62193 - DNA, 15 bp, Homo sapiens
ctgccctttgcctac

SEQ ID NO: 62194 - DNA, 15 bp, Homo sapiens
tgccctttgcctacc

SEQ ID NO: 62195 - DNA, 15 bp, Homo sapiens
gccctttgcctaccc

SEQ ID NO: 62196 - DNA, 15 bp, Homo sapiens
ccctttgcctaccct

SEQ ID NO: 62197 - DNA, 15 bp, Homo sapiens
cctttgcctaccctc

SEQ ID NO: 62198 - DNA, 15 bp, Homo sapiens
ctttgcctaccctca

SEQ ID NO: 62199 - DNA, 15 bp, Homo sapiens
tttgcctaccctcag

SEQ ID NO: 62200 - DNA, 15 bp, Homo sapiens
ttgcctaccctcagc

SEQ ID NO: 62201 - DNA, 15 bp, Homo sapiens
tgcctaccctcagcc

SEQ ID NO: 62202 - DNA, 15 bp, Homo sapiens
gcctaccctcagcca

SEQ ID NO: 62203 - DNA, 15 bp, Homo sapiens
cctaccctcagccat

SEQ ID NO: 62204 - DNA, 15 bp, Homo sapiens
ctaccctcagccatc

SEQ ID NO: 62205 - DNA, 15 bp, Homo sapiens
taccctcagccatcg

SEQ ID NO: 62206 - DNA, 15 bp, Homo sapiens
accctcagccatcgc

SEQ ID NO: 62207 - DNA, 15 bp, Homo sapiens
ccctcagccatcgct

SEQ ID NO: 62208 - DNA, 15 bp, Homo sapiens
cctcagccatcgcta

SEQ ID NO: 62209 - DNA, 15 bp, Homo sapiens
ctcagccatcgctag

SEQ ID NO: 62210 - DNA, 15 bp, Homo sapiens
aggcgaggaggagga

SEQ ID NO: 62211 - DNA, 15 bp, Homo sapiens
agagaacgaagctag

SEQ ID NO: 62212 - DNA, 15 bp, Homo sapiens
tcagagcgacggaca

SEQ ID NO: 62213 - DNA, 15 bp, Homo sapiens
acaactggtctacat

SEQ ID NO: 62214 - DNA, 15 bp, Homo sapiens
ttctgctctgctgtg

SEQ ID NO: 62215 - DNA, 15 bp, Homo sapiens
tgaaacttaagagct

SEQ ID NO: 62216 - DNA, 15 bp, Homo sapiens
ccacggccagggcct

SEQ ID NO: 62217 - DNA, 15 bp, Homo sapiens
acagtgatctgcaca

SEQ ID NO: 62218 - DNA, 15 bp, Homo sapiens
atcgcattagtgccc

SEQ ID NO: 62219 - DNA, 15 bp, Homo sapiens
tgtataccccatctt

SEQ ID NO: 62220 - DNA, 15 bp, Homo sapiens
aatcagccctcattt

SEQ ID NO: 62221 - DNA, 15 bp, Homo sapiens
ttaggcgaagcccca

SEQ ID NO: 62222 - DNA, 15 bp, Homo sapiens
tctaaatggcccatg

SEQ ID NO: 62223 - DNA, 15 bp, Homo sapiens
tatctccaagccctt

SEQ ID NO: 62224 - DNA, 15 bp, Homo sapiens
atctcctacagagat

SEQ ID NO: 62225 - DNA, 15 bp, Homo sapiens
actggtgtacccaat

SEQ ID NO: 62226 - DNA, 3175 bp, Homo sapiens
  misc_feature (2)..(326): n is a, c, g, or t
cngcnnaaagatttcttcacagggtcctttaaactgtcnntttntaagaggtccttccactacaggtaaagggaaattccctctaccctagggcccctcaggancccttcctctctcacacgtttcttcgactgctnnngatttaagcattcagctggccacgcaacgcaagaagcaataagaacacaaaaaccctaccctgttcntcctctatccgtggcctttgccaccacctccacaacctagttcagattcctcttcttttctcaagggaacgtctaaagctctcaagtccgttttggcagggcgattttgtaagtctgaancatttcagtgtgtctctcgatctcaggcagctcaaaagaaaagatctgctggctgcgtgaaggtgcattagaaacctgctgctaccttgcagcctgggctgagcatatgctccggaacttgcttctcttccaacatcctgcacctcagggttgcacgctctggttcccaagcccccggccgctggcttatgcaaatcacttaggtacatgcaaaagtatcccttctcccggagcgccattggcccggggaggtctcgagctcattactatgcagagaggagagccgccattggccaagaggaggaccagaggggcgtgtttctcgggcaaattggatctcctaaattggatgacctgggctgaaagacaacttaaagacccccagaaaactctggttttatagataagaaatctgaggctcgagagagagtgtgttctgcccaacatcatcacggaacagctcctgggctcctggctcctaatctgtcatcgctgtctggaacagcgatgactcgatcgcgagatcaggaaggtggccgagtgtgtcgccgcggccatcaggcacttctccttcctgcccttgtatgaagaaggatgtgtttgcttccccttgtgccatgattgtaaatttcctgaggcctcctcagccctgcagaactggggttatagccatgtgactgatcttcgtccaagaatatgtaaagaaaaagtgttgagttggcttttagggctagagcaatgtatcttaggctcacttaaggaagctgtagagatgagcccaaggagggaaaccagaagagccccccaggctcaccagttgtttgttggctccctacaaacatgtcattcaagtggctaatcttacaacagcacaaattcatctaaccagaaagagaagaggaggctccaaaggcacttgactactgagcatcaccctggacgtgtacaagtctgcgtccttattgttttcttcattgggccgaactttctggtcctcatccaacagctcttctatcacgtgttcgaaagtgtcagccaatgatgtcaagcatcttgaacctgccttgggcccattcacgctctccagagtcccatgggtccgcacacctggagatactctattatagcaaagaagaaagataatttcattgagccatcctgttttacagtattgaattattaccacaaggtaccaaccatatatgcatacttaatagggtattttgtcaaaactatgcatgaaggtcatttgtttgagatgtcagaacattttcccgtgagaagatctcattgggcattgaaacagaaccacatgctcttcagaccagcaaccgcgactaccaaatactcctctgtcaactctacttgagtaagaacgctttcaattaaggcctaagtgtcaacatgcctttaaaaaaaatcgtggtgacacaaaatctttctttttagcacccaacagaatcccttcaaagcctcgtggtctgacaccctatgctacgtgacttgtgacccatccatttgtcatgttcttcgggaatgtggctaaggggctaagatgtgacttgaaaagaaaggtagaacaagatcatctcaaatttattatcaaggaatagttcagaaaacgacttcagaccacagagacagcagaacagatggtccggcatggatagagcatcagacactcacagactgtgccaacaagagccatcgagtcaaaacagccaaaggaaggagggtcatggaatgggttctctcacaccaaactgatgcccagaggccctcagcatgaataacaaaggcaaccagacccacaagccatactgagtggatacaaaacctatacctaggctgacatcccaaatgtgtgtggcaagttagatgatgatggcacaaaagacagaacaccttgcttctggccattgtcagctcttggaagagagcacacttttagaggagcagctgcaaggagcctgagaacaaaactggaaatgtctgttatgaaagccttcacaggaaattctgcaagtggcaacgtgggtccattccgtgtgtgtcactagagctggcgcaagcccatggccatggtgaggcagcgtttccactggaactaatctgatacctgcaccaactcttgcaactgtgcagtgttcccactgcaaactacggatggggtaaaagactgctcacctcctatttctcatctaatctcacacactctgtttgatgaggctatggagaaacaggtcttctcatacactaaaggtgggagtacaaacaattcaagccctgtgcaggacaattaggcaatacctatcaaaattatacatgatttttcctgctgacccagcaattccacttttgggaataattgacagatataggtgcatatgtacaaaatgatggaaagctctctggtatatattagtaagtgataaaacaaggtgtgtgtatatatggctactaccttttgttttaaaaatgggggaaaatggtggagcttgcggtgagccgagatcgtgccactgcactccagcctgggcgacagagcgagactccgtctcaaaaaaaaaacagggtggggtgggggggaaataatagtacatactcatatttacctgtatctatataaaacacactatcaaggattcacaagaaactaatacaaatgatccccttatagatggtatgtattgggggatactgaggtgagcagggtataagtggggcaagacttttcagtgtaaacttcttttaaattttattttgatttttgaataatgtaaattaactgtcaaataattaaattaaaaataaccaatttattaacaaaaaaaaaaaaaaaaaaaata
